(19) United States
(12) Patent Application Publication
(10) Pub. No.: US 2008/0097089 A1
(43) Pub. Date: Apr. 24, 2008

(54) siRNA targeting deubiqutination enzymes

(75) Inventors: Anastasia Khvorova, Boulder, CO (US); Angela Reynolds, Conifer, CO (US); Devin Leake, Denver, CO (US); William Marshall, Boulder, CO (US); Steven Read, Denver, CO (US); Stephen Scaringe, Lafayette, CO (US)

Correspondence Address: KALOW & SPRINGUT LLP, 488 MADISON AVENUE, 19TH FLOOR, NEW YORK, NY, 10022, US

(73) Assignee: DHARMACON, INC., Lafayette, CO (US)

(21) Appl. No.: 11/977,558

(22) Filed: Oct. 25, 2007

Related U.S. Application Data
(63) Continuation-in-part of application No. 10/940,892, filed on Sep. 14, 2004.
Application No. 10/940,892 is a continuation of application No. PCT/US04/14885, filed on May 12, 2004.
(63) Continuation-in-part of application No. 10/714,333, filed on Nov. 14, 2003.
(60) Provisional application No. 60/426,137, filed on Nov. 14, 2002.
(60) Provisional application No. 60/502,050, filed on Sep. 10, 2003.

(51) Int. Cl. C07H 21/02

(52) U.S. Cl. 536/24.1

(57) ABSTRACT

Efficient sequence specific gene silencing is possible through the use of siRNA technology. By selecting particular siRNAs by rational design, one can maximize the generation of an effective gene silencing reagent, as well as methods for silencing genes. Methods, compositions, and kits generated through rational design of siRNAs are disclosed including those directed to nucleotide sequences for deubiquitination enzymes.

### CROSS-REFERENCE TO RELATED APPLICATIONS

[0001] This application is a continuation-in-part of U.S. Ser. No. 10/714,333, filed Nov. 14, 2003, which claims the benefit of U.S. Provisional Application No. 60/426,137, filed Nov. 14, 2002, and also claims the benefit of U.S. Provisional Application No. 60/502,050, filed Sep. 10, 2003; this application is also a continuation-in-part of U.S. Ser. No. 10/940,892, filed Sep. 14, 2004, which is a continuation of PCT Application No. PCT/US04/14885, international filing date May 12, 2004. The disclosures of the priority applications, including the sequence listings and tables submitted in electronic form in lieu of paper, are incorporated by reference into the instant specification.

### SEQUENCE LISTING

[0002] The sequence listing for this application has been submitted in accordance with 37 CFR § 1.52(e) and 37 CFR § 1.821 on CD-ROM in lieu of paper on a disk containing the sequence listing file entitled “DHARMA_{—}2100-US79_CRF.txt” created Sep. 28, 2007, 668 kb. Applicants hereby incorporate by reference the sequence listing provided on CD-ROM in lieu of paper into the instant specification.

### FIELD OF INVENTION

[0003] The present invention relates to RNA interference (“RNAi”).

### BACKGROUND OF THE INVENTION

[0004] Relatively recently, researchers observed that double stranded RNA (“dsRNA”) could be used to inhibit protein expression. This ability to silence a gene has broad potential for treating human diseases, and many researchers and commercial entities are currently investing considerable resources in developing therapies based on this technology.

[0005] Double stranded RNA induced gene silencing can occur on at least three different levels: (i) transcription inactivation, which refers to RNA guided DNA or histone methylation; (ii) siRNA induced mRNA degradation; and (iii) mRNA induced transcriptional attenuation.

[0006] It is generally considered that the major mechanism of RNA induced silencing (RNA interference, or RNAi) in mammalian cells is mRNA degradation. Initial attempts to use RNAi in mammalian cells focused on the use of long strands of dsRNA. However, these attempts to induce RNAi met with limited success, due in part to the induction of the interferon response, which results in a general, as opposed to a target-specific, inhibition of protein synthesis. Thus, long dsRNA is not a viable option for RNAi in mammalian systems.

[0007] More recently it has been shown that when short (18-30 bp) RNA duplexes are introduced into mammalian cells in culture, sequence-specific inhibition of target mRNA can be realized without inducing an interferon response. Certain of these short dsRNAs, referred to as small inhibitory RNAs (“siRNAs”), can act catalytically at sub-molar concentrations to cleave greater than 95% of the target mRNA in the cell. A description of the mechanisms for siRNA activity, as well as some of its applications are described in Provost et al (2002) Ribonuclease Activity and RNA Binding of Recombinant Human Dicer, EMBO J. 21(21): 5864-5874; Tabara et al. (2002) The dsRNA Binding Protein RDE-4 Interacts with RDE-1, DCR-1 and a DexH-box Helicase to Direct RNAi in C. elegans, Cell 109(7):861-71; Ketting et al. (2002) Dicer Functions in RNA Interference and in Synthesis of Small RNA Involved in Developmental Timing in C. elegans; Martinez et al., Single-Stranded Antisense siRNAs Guide Target RNA Cleavage in RNAi, Cell 110(5):563; Hutvagner & Zamore (2002) A microRNA in a multiple-turnover RNAi enzyme complex, Science 297:2056.

[0008] From a mechanistic perspective, introduction of long double stranded RNA into plants and invertebrate cells is broken down into siRNA by a Type III endonuclease known as Dicer. Sharp, RNA interference—2001, Genes Dev. 2001, 15:485. Dicer, a ribonuclease-III-like enzyme, processes the dsRNA into 19-23 base pair short interfering RNAs with characteristic two base 3′ overhangs. Bernstein, Caudy, Hammond, & Hannon (2001) Role for a bidentate ribonuclease in the initiation step of RNA interference, Nature 409:363. The siRNAs are then incorporated into an RNA-induced silencing complex (RISC) where one or more helicases unwind the siRNA duplex, enabling the complementary antisense strand to guide target recognition. Nykanen, Haley, & Zamore (2001) ATP requirements and small interfering RNA structure in the RNA interference pathway, Cell 107:309. Upon binding to the appropriate target mRNA, one or more endonucleases within the RISC cleaves the target to induce silencing. Elbashir, Lendeckel, & Tuschl (2001) RNA interference is mediated by 21- and 22-nucleotide RNAs, Genes Dev. 15:188, FIG. 1.

[0009] The interference effect can be long lasting and may be detectable after many cell divisions. Moreover, RNAi exhibits sequence specificity. Kisielow, M. et al. (2002) Isoform-specific knockdown and expression of adaptor protein ShcA using small interfering RNA, J. Biochem. 363:1-5. Thus, the RNAi machinery can specifically knock down one type of transcript, while not affecting closely related mRNA. These properties make siRNA a potentially valuable tool for inhibiting gene expression and studying gene function and drug target validation. Moreover, siRNAs are potentially useful as therapeutic agents against: (1) diseases that are caused by over-expression or misexpression of genes; and (2) diseases brought about by expression of genes that contain mutations.

[0010] Successful siRNA-dependent gene silencing depends on a number of factors. One of the most contentious issues in RNAi is the question of the necessity of siRNA design, i.e., considering the sequence of the siRNA used. Early work in C. elegans and plants circumvented the issue of design by introducing long dsRNA (see, for instance, Fire, A. et al. (1998) Nature 391:806-811). In this primitive organism, long dsRNA molecules are cleaved into siRNA by Dicer, thus generating a diverse population of duplexes that can potentially cover the entire transcript. While some fraction of these molecules are non-functional (i.e., induce little or no silencing) one or more have the potential to be highly functional, thereby silencing the gene of interest and alleviating the need for siRNA design. Unfortunately, due to the interferon response, this same approach is unavailable for mammalian systems. While this effect can be circumvented by bypassing the Dicer cleavage step and directly introducing siRNA, this tactic carries with it the risk that the chosen siRNA sequence may be non-functional or semi-functional.

[0011] A number of researches have expressed the view that siRNA design is not a crucial element of RNAi. On the other hand, others in the field have begun to explore the possibility that RNAi can be made more efficient by paying attention to the design of the siRNA. Unfortunately, none of the reported methods have provided a satisfactory scheme for reliably selecting siRNA with acceptable levels of functionality. Accordingly, there is a need to develop rational criteria by which to select siRNA with an acceptable level of functionality, and to identify siRNA that have this improved level of functionality, as well as to identify siRNAs that are hyperfunctional.

### SUMMARY OF THE INVENTION

[0012] The present invention is directed to increasing the efficiency of RNAi, particularly in mammalian systems. Accordingly, the present invention provides kits, siRNAs and methods for increasing siRNA efficacy.

[0013] According to a first embodiment, the present invention provides a kit for gene silencing, wherein said kit is comprised of a pool of at least two siRNA duplexes, each of which is comprised of a sequence that is complementary to a portion of the sequence of one or more target messenger RNA, and each of which is selected using non-target specific criteria.

[0014] According to a second embodiment, the present invention provides a method for selecting an siRNA, said method comprising applying selection criteria to a set of potential siRNA that comprise 18-30 base pairs, wherein said selection criteria are non-target specific criteria, and said set comprises at least two siRNAs and each of said at least two siRNAs contains a sequence that is at least substantially complementary to a target gene; and determining the relative functionality of the at least two siRNAs.

[0015] According to a third embodiment, the present invention also provides a method for selecting an siRNA wherein said selection criteria are embodied in a formula comprising:
(−14)*G₁₃−13*A₁−12*U₇−11*U₂−10*A₁₁−10*U₄−10*C₃−10*C₅−10*C₆−9*A₁₀−9*U₉−9*C₁₈−8*G₁₀−7*U₁−7*U₁₆−7*C₁₇−7*C₁₉+7*U₁₇+8*A₂+8*A₄+8*A₅+8*C₄+9*G₈+10*A₇+10*U₁₈+11*A₁₉+11*C₉+15*G₁+18*A₃+19*U₁₀−Tm−3*(GCₜₒₜₐₗ)−6*(GC₁₅₋₁₉)−30*X; or Formula VIII
(−8)*A1+(−1)*A2+(12)*A3+(7)*A4+(18)*A5+(12)*A6+(19)*A7+(6)*A8+(−4)*A9+(−5)*A10+(−2)*A11+(−5)*A12+(17)*A13+(−3)*A14+(4)*A15+(2)*A16+(8)*A17+(11)*A18+(30)*A19+(−13)*U1+(−10)*U2+(2)*U3+(−2)*U4+(−5)*U5+(5)*U6+(−2)*U7+(−10)*U8+(−5)*U9+(15)*U10+(−1)*U11+(0)*U12+(10)*U13+(−9)*U14+(−13)*U15+(−10)*U16+(3)*U17+(9)*U18+(9)*U19+(7)*C1+(3)*C2+(−21)*C3+(5)*C4+(−9)*C5+(−20)*C6+(−18)*C7+(−5)*C8+(5)*C9+(1)*C10+(2)*C11+(−5)*C12+(−3)*C13+(−6)*C14+(−2)*C15+(−5)*C16+(−3)*C17+(−12)*C18+(−18)*C19+(14)*G1+(8)*G2+(7)*G3+(−10)*G4+(−4)*G5+(2)*G6+(1)*G7+(9)*G8+(5)*G9+(−11)*G10+(1)*G11+(9)*G12+(−24)*G13+(18)*G14+(11)*G15+(13)*G16+(−7)*G17+(−9)*G18+(−22)*G19+6*(number of A+U in position 15-19)-3*(number of G+C in whole siRNA), Formula X
wherein position numbering begins at the 5′-most position of a sense strand, and
A₁=1 if A is the base at position 1 of the sense strand, otherwise its value is 0;
A₂=1 if A is the base at position 2 of the sense strand, otherwise its value is 0;
A₃=1 if A is the base at position 3 of the sense strand, otherwise its value is 0;
A₄=1 if A is the base at position 4 of the sense strand, otherwise its value is 0;
A₅=1 if A is the base at position 5 of the sense strand, otherwise its value is 0;
A₆=1 if A is the base at position 6 of the sense strand, otherwise its value is 0;
A₇=1 if A is the base at position 7 of the sense strand, otherwise its value is 0;
A₁₀=1 if A is the base at position 10 of the sense strand, otherwise its value is 0;
A₁₁=1 if A is the base at position 11 of the sense strand, otherwise its value is 0;
A₁₃=1 if A is the base at position 13 of the sense strand, otherwise its value is 0;
A₁₉=1 if A is the base at position 19 of the sense strand, otherwise if another base is present or the sense strand is only 18 base pairs in length, its value is 0;
C₃=1 if C is the base at position 3 of the sense strand, otherwise its value is 0;
C₄=1 if C is the base at position 4 of the sense strand, otherwise its value is 0;
C₅=1 if C is the base at position 5 of the sense strand, otherwise its value is 0;
C₆=1 if C is the base at position 6 of the sense strand, otherwise its value is 0;
C₇=1 if C is the base at position 7 of the sense strand, otherwise its value is 0;
C₉=1 if C is the base at position 9 of the sense strand, otherwise its value is 0;
C₁₇=1 if C is the base at position 17 of the sense strand, otherwise its value is 0;
C₁₈=1 if C is the base at position 18 of the sense strand, otherwise its value is 0;
C₁₉=1 if C is the base at position 19 of the sense strand, otherwise if another base is present or the sense strand is only 18 base pairs in length, its value is 0;
G₁=1 if G is the base at position 1 on the sense strand, otherwise its value is 0;
G₂=1 if G is the base at position 2 of the sense strand, otherwise its value is 0;
G₈=1 if G is the base at position 8 on the sense strand, otherwise its value is 0;
G₁₀=1 if G is the base at position 10 on the sense strand, otherwise its value is 0;
G₁₃=1 if G is the base at position 13 on the sense strand, otherwise its value is 0;
G₁₉=1 if G is the base at position 19 of the sense strand, otherwise if another base is present or the sense strand is only 18 base pairs in length, its value is 0;
U₁=1 if U is the base at position 1 on the sense strand, otherwise its value is 0;
U₂=1 if U is the base at position 2 on the sense strand, otherwise its value is 0;
U₃=1 if U is the base at position 3 on the sense strand, otherwise its value is 0;
U₄=1 if U is the base at position 4 on the sense strand, otherwise its value is 0;
U₇=1 if U is the base at position 7 on the sense strand, otherwise its value is 0;
U₉=1 if U is the base at position 9 on the sense strand, otherwise its value is 0;
U₁₀=1 if U is the base at position 10 on the sense strand, otherwise its value is 0;
U₁₅=1 if U is the base at position 15 on the sense strand, otherwise its value is 0;
U₁₆=1 if U is the base at position 16 on the sense strand, otherwise its value is 0;
U₁₇=1 if U is the base at position 17 on the sense strand, otherwise its value is 0;
U₁₈=1 if U is the base at position 18 on the sense strand, otherwise its value is 0.
GC₅₋₁₉=the number of G and C bases within positions 15-19 of the sense strand, or within positions 15-18 if the sense strand is only 18 base pairs in length;
GCₜₒₜₐₗ=the number of G and C bases in the sense strand;
Tm=100 if the siRNA oligo has the internal repeat longer then 4 base pairs, otherwise its value is 0; and
X=the number of times that the same nucleotide repeats four or more times in a row.

[0016] According to a fourth embodiment, the invention provides a method for developing an algorithm for selecting siRNA, said method comprising: (a) selecting a set of siRNA; (b) measuring gene silencing ability of each siRNA from said set; (c) determining relative functionality of each siRNA; (d) determining improved functionality by the presence or absence of at least one variable selected from the group consisting of the presence or absence of a particular nucleotide at a particular position, the total number of As and Us in positions 15-19, the number of times that the same nucleotide repeats within a given sequence, and the total number of Gs and Cs; and (e) developing an algorithm using the information of step (d).

[0017] According to a fifth embodiment, the present invention provides a kit, wherein said kit is comprised of at least two siRNAs, wherein said at least two siRNAs comprise a first optimized siRNA and a second optimized siRNA, wherein said first optimized siRNA and said second optimized siRNA are optimized according a formula comprising Formula X.

[0018] The present invention also provides a method for identifying a hyperfunctional siRNA, comprising applying selection criteria to a set of potential siRNA that comprise 18-30 base pairs, wherein said selection criteria are non-target specific criteria, and said set comprises at least two siRNAs and each of said at least two siRNAs contains a sequence that is at least substantially complementary to a target gene; determining the relative functionality of the at least two siRNAs and assigning each of the at least two siRNAs a functionality score; and selecting siRNAs from the at least two siRNAs that have a functionality score that reflects greater than 80 percent silencing at a concentration in the picomolar range, wherein said greater than 80 percent silencing endures for greater than 120 hours.

[0019] According to a sixth embodiment, the present invention provides a hyperfunctional siRNA that is capable of silencing Bcl2.

[0020] According to a seventh embodiment, the present invention provides a method for developing an siRNA algorithm for selecting functional and hyperfunctional siRNAs for a given sequence. The method comprises:

[0021] (a) selecting a set of siRNAs;

[0022] (b) measuring the gene silencing ability of each siRNA from said set;

[0023] (c) determining the relative functionality of each siRNA;

[0024] (d) determining the amount of improved functionality by the presence or absence of at least one variable selected from the group consisting of the total GC content, melting temperature of the siRNA, GC content at positions 15-19, the presence or absence of a particular nucleotide at a particular position, relative thermodynamic stability at particular positions in a duplex, and the number of times that the same nucleotide repeats within a given sequence; and

[0025] (e) developing an algorithm using the information of step (d).

[0026] According to this embodiment, preferably the set of siRNAs comprises at least 90 siRNAs from at least one gene, more preferably at least 180 siRNAs from at least two different genes, and most preferably at least 270 and 360 siRNAs from at least three and four different genes, respectively. Additionally, in step (d) the determination is made with preferably at least two, more preferably at least three, even more preferably at least four, and most preferably all of the variables. The resulting algorithm is not target sequence specific.

[0027] In another embodiment, the present invention provides rationally designed siRNAs identified using the formulas above.

[0028] In yet another embodiment, the present invention is directed to hyperfunctional siRNA.

[0029] The ability to use the above algorithms, which are not sequence or species specific, allows for the cost-effective selection of optimized siRNAs for specific target sequences. Accordingly, there will be both greater efficiency and reliability in the use of siRNA technologies.

[0030] In various embodiments, siRNAs that target nucleotide sequences for deubiquitination enzymes are provided. In various embodiments, the siRNAs are rationally designed. In various embodiments, the siRNAs are functional or hyperfunctional.

[0031] In various embodiments, an siRNA that targets nucleotide sequence for a deubiquitination enzyme is provided, wherein the siRNA is selected from the group consisting of various siRNA sequences targeting nucleotide sequences for deubiquitination enzymes that are disclosed herein. In various embodiments, the siRNA sequence is selected from the group consisting of SEQ ID NO. 438 to SEQ ID NO. 3940.

[0032] In various embodiments, siRNA comprising a sense region and an antisense region are provided, said sense region and said antisense region together form a duplex region comprising 18-30 base pairs, and said sense region comprises a sequence that is at least 90% similar to a sequence selected from the group consisting of siRNA sequences targeting nucleotide sequences for deubiquitination enzymes that are disclosed herein. In various embodiments, the siRNA sequence is selected from the group consisting of SEQ ID NO. 438 to SEQ ID NO. 3940.

[0033] In various embodiments, an siRNA comprising a sense region and an antisense region is provided, said sense region and said antisense region together form a duplex region comprising 18-30 base pairs, and said sense region comprises a sequence that is identical to a contiguous stretch of at least 18 bases of a sequence selected from the group consisting of SEQ ID NO. 438 to SEQ ID NO. 3940. In various embodiments, the duplex region is 19-30 base pairs, and the sense region comprises a sequence that is identical to a sequence selected from the group consisting of SEQ ID NO. 438 to SEQ ID NO. 3940.

[0034] In various embodiments, a pool of at least two siRNAs is provided, wherein said pool comprises a first siRNA and a second siRNA, said first siRNA comprising a duplex region of length 18-30 base pairs that has a first sense region that is at least 90% similar to 18 bases of a first sequence selected from the group consisting of SEQ ID NO. 438 to SEQ ID NO. 3940, and said second siRNA comprises a duplex region of length 18-30 base pairs that has a second sense region that is at least 90% similar to 18 bases of a second sequence selected from the group consisting of SEQ ID NO. 438 to SEQ ID NO. 3940, wherein said first sense region and said second sense region are not identical.

[0035] In various embodiments, the first sense region comprises a sequence that is identical to at least 18 bases of a sequence selected from the group consisting of SEQ ID NO. 438 to SEQ ID NO. 3940, and said second sense region comprises a sequence that is identical to at least 18 bases of a sequence selected from the group consisting of SEQ ID NO. 438 to SEQ ID NO. 3940. In various embodiments, the duplex of said first siRNA is 19-30 base pairs, and said first sense region comprises a sequence that is at least 90% similar to a sequence selected from the group consisting of SEQ ID NO. 438 to SEQ ID NO. 3940, and said duplex of said second siRNA is 19-30 base pairs and comprises a sequence that is at least 90% similar to a sequence selected from the group consisting of SEQ ID NO. 438 to SEQ ID NO. 3940.

[0036] In various embodiments, the duplex of said first siRNA is 19-30 base pairs and said first sense region comprises a sequence that is identical to at least 18 bases of a sequence selected from the group consisting of SEQ ID NO. 438 to SEQ ID NO. 3940, and said duplex of said second siRNA is 19-30 base pairs and said second region comprises a sequence that is identical to a sequence selected from the group consisting of SEQ ID NO. 438 to SEQ ID NO. 3940.

[0037] For a better understanding of the present invention together with other and further advantages and embodiments, reference is made to the following description taken in conjunction with the examples, the scope of which is set forth in the appended claims.

### BRIEF DESCRIPTION OF THE FIGURES

[0038] FIG. 1 shows a model for siRNA-RISC interactions. RISC has the ability to interact with either end of the siRNA or miRNA molecule. Following binding, the duplex is unwound, and the relevant target is identified, cleaved, and released.

[0039] FIG. 2 is a representation of the functionality of two hundred and seventy siRNA duplexes that were generated to target human cyclophilin, human diazepam-binding inhibitor (DB), and firefly luciferase.

[0040] FIG. 3a is a representation of the silencing effect of 30 siRNAs in three different cells lines, HEK293, DU145, and Hela. FIG. 3b shows the frequency of different functional groups (>95% silencing (black), >80% silencing (gray), >50% silencing (dark gray), and <50% silencing (white)) based on GC content. In cases where a given bar is absent from a particular GC percentage, no siRNA were identified for that particular group. FIG. 3c shows the frequency of different functional groups based on melting temperature (Tm).

[0041] FIG. 4 is a representation of a statistical analysis that revealed correlations between silencing and five sequence-related properties of siRNA: (A) an A at position 19 of the sense strand, (B) an A at position 3 of the sense strand, (C) a U at position 10 of the sense strand, (D) a base other than G at position 13 of the sense strand, and (E) a base other than C at position 19 of the sense strand. All variables were correlated with siRNA silencing of firefly luciferase and human cyclophilin. siRNAs satisfying the criterion are grouped on the left (Selected) while those that do not, are grouped on the right (Eliminated). Y-axis is “% Silencing of Control.” Each position on the X-axis represents a unique siRNA.

[0042] FIGS. 5A and 5B are representations of firefly luciferase and cyclophilin siRNA panels sorted according to functionality and predicted values using Formula VIII. The siRNA found within the circle represent those that have Formula VIII values (SMARTSCORES™, or siRNA rank) above zero. siRNA outside the indicated area have calculated Formula VIII values that are below zero. Y-axis is “Expression (% Control).” Each position on the X-axis represents a unique siRNA.

[0043] FIG. 6A is a representation of the average internal stability profile (AISP) derived from 270 siRNAs taken from three separate genes (cyclophilin B, DBI and firefly luciferase). Graphs represent AISP values of highly functional, functional, and non-functional siRNA. FIG. 6B is a comparison between the AISP of naturally derived GFP siRNA (filled squares) and the AISP of siRNA from cyclophilin B, DBI, and luciferase having >90% silencing properties (no fill) for the antisense strand. “DG” is the symbol for ΔG, free energy.

[0044] FIG. 7 is a histogram showing the differences in duplex functionality upon introduction of base pair mismatches. The X-axis shows the mismatch introduced in the siRNA and the position it is introduced (e.g., 8C>A reveals that position 8 (which normally has a C) has been changed to an A). The Y-axis is “% Silencing (Normalized to Control).” The samples on the X-axis represent siRNAs at 100 nM and are, reading from left to right: 1A to C, 1A to G, 1A to U; 2A to C, 2A to G, 2A to U; 3A to C, 3A to G, 3A to U; 4G to A, 4G to C; 4G to U; 5U to A, 5U to C, 5U to G; 6U to A, 6U to C, 6U to G; 7G to A, 7G to C, 7G to U; 8C to A, 8C to G, 8C to U; 9G to A, 9G to C, 9G to U; 10C to A, 10C to G, 10C to U; 11G to A, 11G to C, 11G to U; 12G to A, 12G to C, 12G to U; 13A to C, 13A to G, 13A to U; 14G to A, 14G to C, 14G to U; 15G to A, 15G to C, 15G to U; 16A to C, 16A to G, 16A to U; 17G to A, 17G to C, 17G to U; 18U to A, 18U to C, 18U to G; 19U to A, 19U to C, 19U to G; 20 wt; Control.

[0045] FIG. 8 is histogram that shows the effects of 5′sense and antisense strand modification with 2′-O-methylation on functionality.

[0046] FIG. 9 shows a graph of SMARTSCORES™, or siRNA rank, versus RNAi silencing values for more than 360 siRNA directed against 30 different genes. SiRNA to the right of the vertical bar represent those siRNA that have desirable SMARTSCORES™, or siRNA rank.

[0047] FIGS. 10A-E compare the RNAi of five different genes (SEAP, DBI, PLK, Firefly Luciferase, and Renilla Luciferase) by varying numbers of randomly selected siRNA and four rationally designed (SMART-selected) siRNA chosen using the algorithm described in Formula VIII. In addition, RNAi induced by a pool of the four SMART-selected siRNA is reported at two different concentrations (100 and 400 nM). 10F is a comparison between a pool of randomly selected EGFR siRNA (Pool 1) and a pool of SMART-selected EGFR siRNA (Pool 2). Pool 1, S1-S4 and Pool 2 S1-S4 represent the individual members that made up each respective pool. Note that numbers for random siRNAs represent the position of the 5′ end of the sense strand of the duplex. The Y-axis represents the % expression of the control(s). The X-axis is the percent expression of the control.

[0048] FIG. 11 shows the Western blot results from cells treated with siRNA directed against twelve different genes involved in the clathrin-dependent endocytosis pathway (CHC, DynII, CALM, CLCa, CLCb, Eps15, Eps15R, Rab5a, Rab5b, Rab5c, P2 subunit of AP-2 and EEA.1). siRNA were selected using Formula VIII. “Pool” represents a mixture of duplexes 1-4. Total concentration of each siRNA in the pool is 25 nM. Total concentration=4×25=100 nM.

[0049] FIG. 12 is a representation of the gene silencing capabilities of rationally-selected siRNA directed against ten different genes (human and mouse cyclophilin, C-myc, human lamin A/C, QB (ubiquinol-cytochrome c reductase core protein I), MEK1 and MEK2, ATE1 (arginyl-tRNA protein transferase), GAPDH, and Eg5). The Y-axis is the percent expression of the control. Numbers 1, 2, 3 and 4 represent individual rationally selected siRNA. “Pool” represents a mixture of the four individual siRNA.

[0050] FIG. 13 is the sequence of the top ten Bcl2 siRNAs as determined by Formula VIII. Sequences are listed 5′ to 3′.

[0051] FIG. 14 is the knockdown by the top ten Bcl2 siRNAs at 100 nM concentrations. The Y-axis represents the amount of expression relative to the non-specific (ns) and transfection mixture control.

[0052] FIG. 15 represents a functional walk where siRNA beginning on every other base pair of a region of the luciferase gene are tested for the ability to silence the luciferase gene. The Y-axis represents the percent expression relative to a control. The X-axis represents the position of each individual siRNA. Reading from left to right across the X-axis, the position designations are 1, 3, 5, 7, 9, 11, 13, 15, 17, 19, 21, 23, 25, 27, 29, 31, 33, 35, 37, 39, 41, 43, 45, 47, 49, 51, 53, 55, 57, 59, 61, 63, 65, 67, 69, 71, 73, 75, 77, 79, 81, 83, 85, 87, 89, and Plasmid.

[0053] FIGS. 16A and 16B are histograms demonstrating the inhibition of target gene expression by pools of 2 (16A) and 3 (16B) siRNA duplexes taken from the walk described in FIG. 15. The Y-axis in each represents the percent expression relative to control. The X-axis in each represents the position of the first siRNA in paired pools, or trios of siRNAs. For instance, the first paired pool contains siRNAs 1 and 3. The second paired pool contains siRNAs 3 and 5. Pool 3 (of paired pools) contains siRNAs 5 and 7, and so on. For each of 16A and 16B, the X-axis from left to right reads 1, 3, 5, 7, 9, 11, 13, 15, 17, 19, 21, 23, 25, 27, 29, 31, 33, 35, 37, 39, 41, 43, 45, 47, 49, 51, 53, 55, 57, 59, 61, 63, 65, 67, 69, 71, 73, 75, 77, 79, 81, 83, 85, 87, 89, and Plasmid.

[0054] FIGS. 17A and 17B are histograms demonstrating the inhibition of target gene expression by pools of 4 (17A) and 5 (17B) siRNA duplexes. The Y-axis in each represents the percent expression relative to control. The X-axis in each represents the position of the first siRNA in each pool. For each of 17A and 17B, the X-axis from left to right reads 1, 3, 5, 7, 9, 11, 13, 15, 17, 19, 21, 23, 25, 27, 29, 31, 33, 35, 37, 39, 41, 43, 45, 47, 49, 51, 53, 55, 57, 59, 61, 63, 65, 67, 69, 71, 73, 75, 77, 79, 81, 83, 85, 87, 89, and Plasmid.

[0055] FIGS. 18A and 18B are histograms demonstrating the inhibition of target gene expression by siRNAs that are ten (18A) and twenty (18B) base pairs base pairs apart. The Y-axis represents the percent expression relative to a control. The X-axis represents the position of the first siRNA in each pool. For each of 18A and 18B, the X-axis from left to right reads 1, 3, 5, 7, 9, 11, 13, 15, 17, 19, 21, 23, 25, 27, 29, 31, 33, 35, 37, 39, 41, 43, 45, 47, 49, 51, 53, 55, 57, 59, 61, 63, 65, 67, 69, 71, 73, 75, 77, 79, 81, 83, 85, 87, 89, and Plasmid.

[0056] FIG. 19 shows that pools of siRNAs (dark gray bar) work as well (or better) than the best siRNA in the pool (light gray bar). The Y-axis represents the percent expression relative to a control. The X-axis represents the position of the first siRNA in each pool. The X-axis from left to right reads 1, 3, 5, 7, 9, 11, 13, 15, 17, 19, 21, 23, 25, 27, 29, 31, 33, 35, 37, 39, 41, 43, 45, 47, 49, 51, 53, 55, 57, 59, 61, 63, 65, 67, 69, 71, 73, 75, 77, 79, 81, 83, 85, 87, 89, and Plasmid.

[0057] FIG. 20 shows that the combination of several semifunctional siRNAs (dark gray) result in a significant improvement of gene expression inhibition over individual (semi-functional; light gray) siRNA. The Y-axis represents the percent expression relative to a control.

[0058] FIGS. 21A, 21B and 21C show both pools (Library, Lib) and individual siRNAs in inhibition of gene expression of Beta-Galactosidase, Renilla Luciferase and SEAP (alkaline phosphatase). Numbers on the X-axis indicate the position of the 5′-most nucleotide of the sense strand of the duplex. The Y-axis represents the percent expression of each gene relative to a control. Libraries contain 19 nucleotide long siRNAs (not including overhangs) that begin at the following nucleotides: SEAP: Lib 1: 206, 766, 812, 923, Lib 2: 1117, 1280, 1300, 1487, Lib 3: 206, 766, 812, 923, 1117, 1280, 1300, 1487, Lib 4: 206, 812, 1117, 1300, Lib 5: 766, 923, 1280, 1487, Lib 6: 206, 1487; Bgal: Lib 1: 979, 1339, 2029, 2590, Lib 2: 1087, 1783, 2399, 3257, Lib 3: 979, 1783, 2590, 3257, Lib 4: 979, 1087, 1339, 1783, 2029, 2399, 2590, 3257, Lib 5: 979, 1087, 1339, 1783, Lib 6: 2029, 2399, 2590, 3257; Renilla: Lib 1: 174, 300, 432, 568, Lib 2: 592, 633, 729, 867, Lib 3: 174, 300, 432, 568, 592, 633, 729, 867, Lib 4: 174, 432, 592, 729, Lib 5: 300, 568, 633, 867, Lib 6: 592, 568.

[0059] FIG. 22 shows the results of an EGFR and TfnR internalization assay when single gene knockdowns are performed. The Y-axis represents percent internalization relative to control.

[0060] FIG. 23 shows the results of an EGFR and TfnR internalization assay when multiple genes are knocked down (e.g., Rab5a, b, c). The Y-axis represents the percent internalization relative to control.

[0061] FIG. 24 shows the simultaneous knockdown of four different genes. siRNAs directed against G6PD, GAPDH, PLK, and UQC were simultaneously introduced into cells. Twenty-four hours later, cultures were harvested and assayed for mRNA target levels for each of the four genes. A comparison is made between cells transfected with individual siRNAs vs. a pool of siRNAs directed against all four genes.

[0062] FIG. 25 shows the functionality of ten siRNAs at 0.3 nM concentrations.

### DETAILED DESCRIPTION

### Definitions

[0063] Unless stated otherwise, the following terms and phrases have the meanings provided below:

Complementary

[0064] The term “complementary” refers to the ability of polynucleotides to form base pairs with one another. Base pairs are typically formed by hydrogen bonds between nucleotide units in antiparallel polynucleotide strands. Complementary polynucleotide strands can base pair in the Watson-Crick manner (e.g., A to T, A to U, C to G), or in any other manner that allows for the formation of duplexes. As persons skilled in the art are aware, when using RNA as opposed to DNA, uracil rather than thymine is the base that is considered to be complementary to adenosine. However, when a U is denoted in the context of the present invention, the ability to substitute a T is implied, unless otherwise stated.

[0065] Perfect complementarity or 100% complementarity refers to the situation in which each nucleotide unit of one polynucleotide strand can hydrogen bond with a nucleotide unit of a second polynucleotide strand. Less than perfect complementarity refers to the situation in which some, but not all, nucleotide units of two strands can hydrogen bond with each other. For example, for two 20-mers, if only two base pairs on each strand can hydrogen bond with each other, the polynucleotide strands exhibit 10% complementarity. In the same example, if 18 base pairs on each strand can hydrogen bond with each other, the polynucleotide strands exhibit 90% complementarity.

Deoxynucleotide

[0066] The term “deoxynucleotide” refers to a nucleotide or polynucleotide lacking a hydroxyl group (OH group) at the 2′ and/or 3′ position of a sugar moiety. Instead, it has a hydrogen bonded to the 2′ and/or 3′ carbon. Within an RNA molecule that comprises one or more deoxynucleotides, “deoxynucleotide” refers to the lack of an OH group at the 2′ position of the sugar moiety, having instead a hydrogen bonded directly to the 2′ carbon.

Deoxyribonucleotide

[0067] The terms “deoxyribonucleotide” and “DNA” refer to a nucleotide or polynucleotide comprising at least one sugar moiety that has an H, rather than an OH, at its 2′ and/or 3′position.

Duplex Region

[0068] The phrase “duplex region” refers to the region in two complementary or substantially complementary polynucleotides that form base pairs with one another, either by Watson-Crick base pairing or any other manner that allows for a stabilized duplex between polynucleotide strands that are complementary or substantially complementary. For example, a polynucleotide strand having 21 nucleotide units can base pair with another polynucleotide of 21 nucleotide units, yet only 19 bases on each strand are complementary or substantially complementary, such that the “duplex region” has 19 base pairs. The remaining bases may, for example, exist as 5′ and 3′ overhangs. Further, within the duplex region, 100% complementarity is not required; substantial complementarity is allowable within a duplex region. Substantial complementarity refers to 79% or greater complementarity. For example, a mismatch in a duplex region consisting of 19 base pairs results in 94.7% complementarity, rendering the duplex region substantially complementary.

Filters

[0069] The term “filter” refers to one or more procedures that are performed on sequences that are identified by the algorithm. In some instances, filtering includes in silico procedures where sequences identified by the algorithm can be screened to identify duplexes carrying desirable or undesirable motifs. Sequences carrying such motifs can be selected for, or selected against, to obtain a final set with the preferred properties. In other instances, filtering includes wet lab experiments. For instance, sequences identified by one or more versions of the algorithm can be screened using any one of a number of procedures to identify duplexes that have hyperfunctional traits (e.g., they exhibit a high degree of silencing at subnanomolar concentrations and/or exhibit high degrees of silencing longevity).

Gene Silencing

[0070] The phrase “gene silencing” refers to a process by which the expression of a specific gene product is lessened or attenuated. Gene silencing can take place by a variety of pathways. Unless specified otherwise, as used herein, gene silencing refers to decreases in gene product expression that results from RNA interference (RNAi), a defined, though partially characterized pathway whereby small inhibitory RNA (siRNA) act in concert with host proteins (e.g., the RNA induced silencing complex, RISC) to degrade messenger RNA (mRNA) in a sequence-dependent fashion. The level of gene silencing can be measured by a variety of means, including, but not limited to, measurement of transcript levels by Northern Blot Analysis, B-DNA techniques, transcription-sensitive reporter constructs, expression profiling (e.g., DNA chips), and related technologies. Alternatively, the level of silencing can be measured by assessing the level of the protein encoded by a specific gene. This can be accomplished by performing a number of studies including Western Analysis, measuring the levels of expression of a reporter protein that has e.g., fluorescent properties (e.g., GFP) or enzymatic activity (e.g., alkaline phosphatases), or several other procedures.

miRNA

[0071] The term “miRNA” refers to microRNA.

Nucleotide

[0072] The term “nucleotide” refers to a ribonucleotide or a deoxyribonucleotide or modified form thereof, as well as an analog thereof. Nucleotides include species that comprise purines, e.g., adenine, hypoxanthine, guanine, and their derivatives and analogs, as well as pyrimidines, e.g., cytosine, uracil, thymine, and their derivatives and analogs.

[0073] Nucleotide analogs include nucleotides having modifications in the chemical structure of the base, sugar and/or phosphate, including, but not limited to, 5-position pyrimidine modifications, 8-position purine modifications, modifications at cytosine exocyclic amines, and substitution of 5-bromo-uracil; and 2′-position sugar modifications, including but not limited to, sugar-modified ribonucleotides in which the 2′-OH is replaced by a group such as an H, OR, R, halo, SH, SR, NH₂, NHR, NR₂, or CN, wherein R is an alkyl moiety. Nucleotide analogs are also meant to include nucleotides with bases such as inosine, queuosine, xanthine, sugars such as 2′-methyl ribose, non-natural phosphodiester linkages such as methylphosphonates, phosphorothioates and peptides.

[0074] Modified bases refer to nucleotide bases such as, for example, adenine, guanine, cytosine, thymine, uracil, xanthine, inosine, and queuosine that have been modified by the replacement or addition of one or more atoms or groups. Some examples of types of modifications that can comprise nucleotides that are modified with respect to the base moieties include but are not limited to, alkylated, halogenated, thiolated, aminated, amidated, or acetylated bases, individually or in combination. More specific examples include, for example, 5-propynyluridine, 5-propynylcytidine, 6-methyladenine, 6-methylguanine, N,N,-dimethyladenine, 2-propyladenine, 2-propylguanine, 2-aminoadenine, 1-methylinosine, 3-methyluridine, 5-methylcytidine, 5-methyluridine and other nucleotides having a modification at the 5 position, 5-(2-amino)propyl uridine, 5-halocytidine, 5-halouridine, 4-acetylcytidine, 1-methyladenosine, 2-methyladenosine, 3-methylcytidine, 6-methyluridine, 2-methylguanosine, 7-methylguanosine, 2,2-dimethylguanosine, 5-methylaminoethyluridine, 5-methyloxyuridine, deazanucleotides such as 7-deaza-adenosine, 6-azouridine, 6-azocytidine, 6-azothymidine, 5-methyl-2-thiouridine, other thio bases such as 2-thiouridine and 4-thiouridine and 2-thiocytidine, dihydrouridine, pseudouridine, queuosine, archaeosine, naphthyl and substituted naphthyl groups, any O- and N-alkylated purines and pyrimidines such as N6-methyladenosine, 5-methylcarbonylmethyluridine, uridine 5-oxyacetic acid, pyridine-4-one, pyridine-2-one, phenyl and modified phenyl groups such as aminophenol or 2,4,6-trimethoxy benzene, modified cytosines that act as G-clamp nucleotides, 8-substituted adenines and guanines, 5-substituted uracils and thymines, azapyrimidines, carboxyhydroxyalkyl nucleotides, carboxyalkylaminoalkyl nucleotides, and alkylcarbonylalkylated nucleotides. Modified nucleotides also include those nucleotides that are modified with respect to the sugar moiety, as well as nucleotides having sugars or analogs thereof that are not ribosyl. For example, the sugar moieties may be, or be based on, mannoses, arabinoses, glucopyranoses, galactopyranoses, 4′-thioribose, and other sugars, heterocycles, or carbocycles.

[0075] The term nucleotide is also meant to include what are known in the art as universal bases. By way of example, universal bases include but are not limited to 3-nitropyrrole, 5-nitroindole, or nebularine. The term “nucleotide” is also meant to include the N3′ to P5′ phosphoramidate, resulting from the substitution of a ribosyl 3′ oxygen with an amine group.

[0076] Further, the term nucleotide also includes those species that have a detectable label, such as for example a radioactive or fluorescent moiety, or mass label attached to the nucleotide.

Off-Target Silencing and Off-Target Interference

[0077] The phrases “off-target silencing” and “off-target interference” are defined as degradation of mRNA other than the intended target mRNA due to overlapping and/or partial homology with secondary mRNA messages.

Polynucleotide

[0078] The term “polynucleotide” refers to polymers of nucleotides, and includes but is not limited to DNA, RNA, DNA/RNA hybrids including polynucleotide chains of regularly and/or irregularly alternating deoxyribosyl moieties and ribosyl moieties (i.e., wherein alternate nucleotide units have an —OH, then and —H, then an —OH, then an —H, and so on at the 2′ position of a sugar moiety), and modifications of these kinds of polynucleotides, wherein the attachment of various entities or moieties to the nucleotide units at any position are included.

Polyribonucleotide

[0079] The term “polyribonucleotide” refers to a polynucleotide comprising two or more modified or unmodified ribonucleotides and/or their analogs. The term “polyribonucleotide” is used interchangeably with the term “oligoribonucleotide.”

Ribonucleotide and Ribonucleic Acid

[0080] The term “ribonucleotide” and the phrase “ribonucleic acid” (RNA), refer to a modified or unmodified nucleotide or polynucleotide comprising at least one ribonucleotide unit. A ribonucleotide unit comprises an hydroxyl group attached to the 2′ position of a ribosyl moiety that has a nitrogenous base attached in N-glycosidic linkage at the 1′ position of a ribosyl moiety, and a moiety that either allows for linkage to another nucleotide or precludes linkage.

siRNA

[0081] The term “siRNA” refers to small inhibitory RNA duplexes that induce the RNA interference (RNAi) pathway. These molecules can vary in length (generally 18-30 base pairs) and contain varying degrees of complementarity to their target mRNA in the antisense strand. Some, but not all, siRNA have unpaired overhanging bases on the 5′ or 3′ end of the sense strand and/or the antisense strand. The term “siRNA” includes duplexes of two separate strands, as well as single strands that can form hairpin structures comprising a duplex region.

[0082] siRNA may be divided into five (5) groups (non-functional, semi-functional, functional, highly functional, and hyper-functional) based on the level or degree of silencing that they induce in cultured cell lines. As used herein, these definitions are based on a set of conditions where the siRNA is transfected into said cell line at a concentration of 100 nM and the level of silencing is tested at a time of roughly 24 hours after transfection, and not exceeding 72 hours after transfection. In this context, “non-functional siRNA” are defined as those siRNA that induce less than 50% (<50%) target silencing. “Semi-functional siRNA” induce 50-79% target silencing. “Functional siRNA” are molecules that induce 80-95% gene silencing. “Highly-functional siRNA” are molecules that induce greater than 95% gene silencing. “Hyperfunctional siRNA” are a special class of molecules. For purposes of this document, hyperfunctional siRNA are defined as those molecules that: (1) induce greater than 95% silencing of a specific target when they are transfected at subnanomolar concentrations (i.e., less than one nanomolar); and/or (2) induce functional (or better) levels of silencing for greater than 96 hours. These relative functionalities (though not intended to be absolutes) may be used to compare siRNAs to a particular target for applications such as functional genomics, target identification and therapeutics.

SMARTSCORE™, or siRNA rank

[0083] The term “SMARTSCORE™”, or “siRNA rank” refers to a number determined by applying any of the formulas to a given siRNA sequence. The term “SMART-selected” or “rationally selected” or “rational selection” refers to siRNA that have been selected on the basis of their SMARTSCORES™, or siRNA ranking.

Substantially Similar

[0084] The phrase “substantially similar” refers to a similarity of at least 90% with respect to the identity of the bases of the sequence.

Target

[0085] The term “target” is used in a variety of different forms throughout this document and is defined by the context in which it is used. “Target mRNA” refers to a messenger RNA to which a given siRNA can be directed against. “Target sequence” and “target site” refer to a sequence within the mRNA to which the sense strand of an siRNA shows varying degrees of homology and the antisense strand exhibits varying degrees of complementarity. The phrase “siRNA target” can refer to the gene, mRNA, or protein against which an siRNA is directed. Similarly, “target silencing” can refer to the state of a gene, or the corresponding mRNA or protein.

Transfection

[0086] The term “transfection” refers to a process by which agents are introduced into a cell. The list of agents that can be transfected is large and includes, but is not limited to, siRNA, sense and/or anti-sense sequences, DNA encoding one or more genes and organized into an expression plasmid, proteins, protein fragments, and more. There are multiple methods for transfecting agents into a cell including, but not limited to, electroporation, calcium phosphate-based transfections, DEAE-dextran-based transfections, lipid-based transfections, molecular conjugate-based transfections (e.g., polylysine-DNA conjugates), microinjection and others.

[0087] The present invention is directed to improving the efficiency of gene silencing by siRNA. Through the inclusion of multiple siRNA sequences that are targeted to a particular gene and/or selecting an siRNA sequence based on certain defined criteria, improved efficiency may be achieved.

[0088] The present invention will now be described in connection with preferred embodiments. These embodiments are presented in order to aid in an understanding of the present invention and are not intended, and should not be construed, to limit the invention in any way. All alternatives, modifications and equivalents that may become apparent to those of ordinary skill upon reading this disclosure are included within the spirit and scope of the present invention.

[0089] Furthermore, this disclosure is not a primer on RNA interference. Basic concepts known to persons skilled in the art have not been set forth in detail.

[0090] The present invention is directed to increasing the efficiency of RNAi, particularly in mammalian systems. Accordingly, the present invention provides kits, siRNAs and methods for increasing siRNA efficacy.

[0091] According to a first embodiment, the present invention provides a kit for gene silencing, wherein said kit is comprised of a pool of at least two siRNA duplexes, each of which is comprised of a sequence that is complementary to a portion of the sequence of one or more target messenger RNA, and each of which is selected using non-target specific criteria. Each of the at least two siRNA duplexes of the kit complementary to a portion of the sequence of one or more target mRNAs is preferably selected using Formula X.

[0092] According to a second embodiment, the present invention provides a method for selecting an siRNA, said method comprising applying selection criteria to a set of potential siRNA that comprise 18-30 base pairs, wherein said selection criteria are non-target specific criteria, and said set comprises at least two siRNAs and each of said at least two siRNAs contains a sequence that is at least substantially complementary to a target gene; and determining the relative functionality of the at least two siRNAs.

[0093] In one embodiment, the present invention also provides a method wherein said selection criteria are embodied in a formula comprising:
(−14)*G₁₃−13*A₁−12*U₇−11*U₂−10*A₁₁−10*U₄−10*C₃−10*C₅−1*C₆−9*A₁₀−9*U₉−9*C₁₈−8*G₁₀−7*U₁−7*U₁₆−7*C₁₇−7*C₁₉+7*U₁₇+8*A₂+8*A₄+8*A₅+8*C₄+9*G₈+10*A₇+10*U₁₈+11*A₁₉+11*C₉+15*G₁+18*A₃+19*U₁₀−Tm−3*(GCₜₒₜₐₗ)−6*(GC₁₅₋₁₉)−30*X; or Formula VIII
(−8)*A1+(−1)*A2+(12)*A3+(7)*A4+(18)*A5+(12)*A6+(19)*A7+(6)*A8+(−4)*A9+(−5)*A10+(−2)*A11+(−5)*A12+(17)*A13+(−3)*A14+(4)*A15+(2)*A16+(8)*A17+(11)*A18+(30)*A19+(−13)*U1+(−10)*U2+(2)*U3+(−2)*U4+(−5)*U5+(5)*U6+(−2)*U7+(−10)*U8+(−5)*U9+(15)*U10+(−1)*U11+(0)*U12+(10)*U13+(−9)*U14+(−13)*U15+(−10)*U16+(3)*U17+(9)*U18+(9)*U19+(7)*C1+(3)*C2+(−21)*C3+(5)*C4+(−9)*C5+(−20)*C6+(−18)*C7+(−5)*C8+(5)*C9+(1)*C10+(2)*C11+(−5)*C12+(−3)*C13+(−6)*C14+(−2)*C15+(−5)*C16+(−3)*C17+(−12)*C18+(−18)*C19+(14)*G1+(8)*G2+(7)*G3+(−10)*G4+(−4)*G5+(2)*G6+(1)*G7+(9)*G8+(5)*G9+(−11)*G10+(1)*G11+(9)*G12+(−24)*G13+(18)*G14+(11)*G15+(13)*G16+(−7)*G17+(−9)*G18+(−22)*G19+6*(number of A+U in position 15-19)−3*(number of G+C in whole siRNA), Formula X

[0094] wherein position numbering begins at the 5′-most position of a sense strand, and

A₁=1 if A is the base at position 1 of the sense strand, otherwise its value is 0;

A₂=1 if A is the base at position 2 of the sense strand, otherwise its value is 0;

A₃=1 if A is the base at position 3 of the sense strand, otherwise its value is 0;

A₄=1 if A is the base at position 4 of the sense strand, otherwise its value is 0;

A₅=1 if A is the base at position 5 of the sense strand, otherwise its value is 0;

A₆=1 if A is the base at position 6 of the sense strand, otherwise its value is 0;

A₇=1 if A is the base at position 7 of the sense strand, otherwise its value is 0;

A₁₀=1 if A is the base at position 10 of the sense strand, otherwise its value is 0;

A₁₁=1 if A is the base at position 11 of the sense strand, otherwise its value is 0;

A₁₃=1 if A is the base at position 13 of the sense strand, otherwise its value is 0;

A₁₉=1 if A is the base at position 19 of the sense strand, otherwise if another base is present or the sense strand is only 18 base pairs in length, its value is 0;

[0095] C₃=1 if C is the base at position 3 of the sense strand, otherwise its value is 0;

C₄=1 if C is the base at position 4 of the sense strand, otherwise its value is 0;

C₅=1 if C is the base at position 5 of the sense strand, otherwise its value is 0;

C₆=1 if C is the base at position 6 of the sense strand, otherwise its value is 0;

C₇=1 if C is the base at position 7 of the sense strand, otherwise its value is 0;

C₉=1 if C is the base at position 9 of the sense strand, otherwise its value is 0;

C₁₇=1 if C is the base at position 17 of the sense strand, otherwise its value is 0;

C₁₈=1 if C is the base at position 18 of the sense strand, otherwise its value is 0;

C₁₉=1 if C is the base at position 19 of the sense strand, otherwise if another base is present or the sense strand is only 18 base pairs in length, its value is 0;

[0096] G₁=1 if G is the base at position 1 on the sense strand, otherwise its value is 0;

G₂=1 if G is the base at position 2 of the sense strand, otherwise its value is 0;

G₈=1 if G is the base at position 8 on the sense strand, otherwise its value is 0;

G₁₀=1 if G is the base at position 10 on the sense strand, otherwise its value is 0;

[0097] G₁₃=1 if G is the base at position 13 on the sense strand, otherwise its value is 0;
   G₁₉=1 if G is the base at position 19 of the sense strand, otherwise if another base is present or the sense strand is only 18 base pairs in length, its value is 0;
   U₁=1 if U is the base at position 1 on the sense strand, otherwise its value is 0;
   U₂=1 if U is the base at position 2 on the sense strand, otherwise its value is 0;
   U₃=1 if U is the base at position 3 on the sense strand, otherwise its value is 0;
   U₄=1 if U is the base at position 4 on the sense strand, otherwise its value is 0;
   U₇=1 if U is the base at position 7 on the sense strand, otherwise its value is 0;
   U₉=1 if U is the base at position 9 on the sense strand, otherwise its value is 0;
   U₁₀=1 if U is the base at position 10 on the sense strand, otherwise its value is 0;
   U₁₅=1 if U is the base at position 15 on the sense strand, otherwise its value is 0;
   U₁₆=1 if U is the base at position 16 on the sense strand, otherwise its value is 0;
   U₁₇=1 if U is the base at position 17 on the sense strand, otherwise its value is 0;
   U₁₈=1 if U is the base at position 18 on the sense strand, otherwise its value is 0.

[0098] GC₁₅₋₁₉=the number of G and C bases within positions 15-19 of the sense strand, or within positions 15-18 if the sense strand is only 18 base pairs in length;

[0099] GCₜₒₜₐₗ=the number of G and C bases in the sense strand;

Tm=100 if the siRNA oligo has the internal repeat longer then 4 base pairs, otherwise its value is 0; and

[0100] X=the number of times that the same nucleotide repeats four or more times in a row.

[0101] Any of the methods of selecting siRNA in accordance with the invention can further comprise comparing the internal stability profiles of the siRNAs to be selected, and selecting those siRNAs with the most favorable internal stability profiles. Any of the methods of selecting siRNA can further comprise selecting either for or against sequences that contain motifs that induce cellular stress. Such motifs include, for example, toxicity motifs. Any of the methods of selecting siRNA can further comprise either selecting for or selecting against sequences that comprise stability motifs.

[0102] In another embodiment, the present invention provides a method of gene silencing, comprising introducing into a cell at least one siRNA selected according to any of the methods of the present invention. The siRNA can be introduced by allowing passive uptake of siRNA, or through the use of a vector.

[0103] According to a third embodiment, the invention provides a method for developing an algorithm for selecting siRNA, said method comprising: (a) selecting a set of siRNA; (b) measuring gene silencing ability of each siRNA from said set; (c) determining relative functionality of each siRNA; (d) determining improved functionality by the presence or absence of at least one variable selected from the group consisting of the presence or absence of a particular nucleotide at a particular position, the total number of As and Us in positions 15-19, the number of times that the same nucleotide repeats within a given sequence, and the total number of Gs and Cs; and (e) developing an algorithm using the information of step (d).

[0104] In another embodiment, the invention provides a method for selecting an siRNA with improved functionality, comprising using the above-mentioned algorithm to identify an siRNA of improved functionality.

[0105] According to a fourth embodiment, the present invention provides a kit, wherein said kit is comprised of at least two siRNAs, wherein said at least two siRNAs comprise a first optimized siRNA and a second optimized siRNA, wherein said first optimized siRNA and said second optimized siRNA are optimized according a formula comprising Formula X.

[0106] According to a fifth embodiment, the present invention provides a method for identifying a hyperfunctional siRNA, comprising applying selection criteria to a set of potential siRNA that comprise 18-30 base pairs, wherein said selection criteria are non-target specific criteria, and said set comprises at least two siRNAs and each of said at least two siRNAs contains a sequence that is at least substantially complementary to a target gene; determining the relative functionality of the at least two siRNAs and assigning each of the at least two siRNAs a functionality score; and selecting siRNAs from the at least two siRNAs that have a functionality score that reflects greater than 80 percent silencing at a concentration in the picomolar range, wherein said greater than 80 percent silencing endures for greater than 120 hours.

[0107] In other embodiments, the invention provides kits and/or methods wherein the siRNA are comprised of two separate polynucleotide strands; wherein the siRNA are comprised of a single contiguous molecule such as, for example, a unimolecular siRNA (comprising, for example, either a nucleotide or non-nucleotide loop); wherein the siRNA are expressed from one or more vectors; and wherein two or more genes are silenced by a single administration of siRNA.

[0108] According to a sixth embodiment, the present invention provides a hyperfunctional siRNA that is capable of silencing Bcl2.

[0109] According to a seventh embodiment, the present invention provides a method for developing an siRNA algorithm for selecting functional and hyperfunctional siRNAs for a given sequence. The method comprises:

[0110] (a) selecting a set of siRNAs;

[0111] (b) measuring the gene silencing ability of each siRNA from said set;

[0112] (c) determining the relative functionality of each siRNA;

[0113] (d) determining the amount of improved functionality by the presence or absence of at least one variable selected from the group consisting of the total GC content, melting temperature of the siRNA, GC content at positions 15-19, the presence or absence of a particular nucleotide at a particular position, relative thermodynamic stability at particular positions in a duplex, and the number of times that the same nucleotide repeats within a given sequence; and

[0114] (e) developing an algorithm using the information of step (d).

[0115] According to this embodiment, preferably the set of siRNAs comprises at least 90 siRNAs from at least one gene, more preferably at least 180 siRNAs from at least two different genes, and most preferably at least 270 and 360 siRNAs from at least three and four different genes, respectively. Additionally, in step (d) the determination is made with preferably at least two, more preferably at least three, even more preferably at least four, and most preferably all of the variables. The resulting algorithm is not target sequence specific.

[0116] In another embodiment, the present invention provides rationally designed siRNAs identified using the formulas above.

[0117] In yet another embodiment, the present invention is directed to hyperfunctional siRNA.

[0118] The ability to use the above algorithms, which are not sequence or species specific, allows for the cost-effective selection of optimized siRNAs for specific target sequences. Accordingly, there will be both greater efficiency and reliability in the use of siRNA technologies.

[0119] The methods disclosed herein can be used in conjunction with comparing internal stability profiles of selected siRNAs, and designing an siRNA with a desirable internal stability profile; and/or in conjunction with a selection either for or against sequences that contain motifs that induce cellular stress, for example, cellular toxicity.

[0120] Any of the methods disclosed herein can be used to silence one or more genes by introducing an siRNA selected, or designed, in accordance with any of the methods disclosed herein. The siRNA(s) can be introduced into the cell by any method known in the art, including passive uptake or through the use of one or more vectors.

[0121] Any of the methods and kits disclosed herein can employ either unimolecular siRNAs, siRNAs comprised of two separate polynucleotide strands, or combinations thereof. Any of the methods disclosed herein can be used in gene silencing, where two or more genes are silenced by a single administration of siRNA(s). The siRNA(s) can be directed against two or more target genes, and administered in a single dose or single transfection, as the case may be.

Optimizing siRNA

[0122] According to one embodiment, the present invention provides a method for improving the effectiveness of gene silencing for use to silence a particular gene through the selection of an optimal siRNA. An siRNA selected according to this method may be used individually, or in conjunction with the first embodiment, i.e., with one or more other siRNAs, each of which may or may not be selected by this criteria in order to maximize their efficiency.

[0123] The degree to which it is possible to select an siRNA for a given mRNA that maximizes these criteria will depend on the sequence of the mRNA itself. However, the selection criteria will be independent of the target sequence. According to this method, an siRNA is selected for a given gene by using a rational design. That said, rational design can be described in a variety of ways. Rational design is, in simplest terms, the application of a proven set of criteria that enhance the probability of identifying a functional or hyperfunctional siRNA. In one method, rationally designed siRNA can be identified by maximizing one or more of the following criteria:

[0124] (1) A low GC content, preferably between about 30-52%.

[0125] (2) At least 2, preferably at least 3 A or U bases at positions 15-19 of the siRNA on the sense strand.

[0126] (3) An A base at position 19 of the sense strand.

[0127] (4) An A base at position 3 of the sense strand.

[0128] (5) A U base at position 10 of the sense strand.

[0129] (6) An A base at position 14 of the sense strand.

[0130] (7) A base other than C at position 19 of the sense strand.

[0131] (8) A base other than G at position 13 of the sense strand.

[0132] (9) A Tm, which refers to the character of the internal repeat that results in inter- or intramolecular structures for one strand of the duplex, that is preferably not stable at greater than 50° C., more preferably not stable at greater than 37° C., even more preferably not stable at greater than 30° C. and most preferably not stable at greater than 20° C.

[0133] (10) A base other than U at position 5 of the sense strand.

[0134] (11) A base other than A at position 11 of the sense strand.

[0135] (12) A base other than an A at position 1 of the sense strand.

[0136] (13) A base other than an A at position 2 of the sense strand.

[0137] (14) An A base at position 4 of the sense strand.

[0138] (15) An A base at position 5 of the sense strand.

[0139] (16) An A base at position 6 of the sense strand.

[0140] (17) An A base at position 7 of the sense strand.

[0141] (18) An A base at position 8 of the sense strand.

[0142] (19) A base other than an A at position 9 of the sense strand.

[0143] (20) A base other than an A at position 10 of the sense strand.

[0144] (21) A base other than an A at position 11 of the sense strand.

[0145] (22) A base other than an A at position 12 of the sense strand.

[0146] (23) An A base at position 13 of the sense strand.

[0147] (24) A base other than an A at position 14 of the sense strand.

[0148] (25) An A base at position 15 of the sense strand

[0149] (26) An A base at position 16 of the sense strand.

[0150] (27) An A base at position 17 of the sense strand.

[0151] (28) An A base at position 18 of the sense strand.

[0152] (29) A base other than a U at position 1 of the sense strand.

[0153] (30) A base other than a U at position 2 of the sense strand.

[0154] (31) A U base at position 3 of the sense strand.

[0155] (32) A base other than a U at position 4 of the sense strand.

[0156] (33) A base other than a U at position 5 of the sense strand.

[0157] (34) A U base at position 6 of the sense strand.

[0158] (35) A base other than a U at position 7 of the sense strand.

[0159] (36) A base other than a U at position 8 of the sense strand.

[0160] (37) A base other than a U at position 9 of the sense strand.

[0161] (38) A base other than a U at position 11 of the sense strand.

[0162] (39) A U base at position 13 of the sense strand.

[0163] (40) A base other than a U at position 14 of the sense strand.

[0164] (41) A base other than a U at position 15 of the sense strand.

[0165] (42) A base other than a U at position 16 of the sense strand.

[0166] (43) A U base at position 17 of the sense strand.

[0167] (44) A U base at position 18 of the sense strand.

[0168] (45) A U base at position 19 of the sense strand.

[0169] (46) A C base at position 1 of the sense strand.

[0170] (47) A C base at position 2 of the sense strand.

[0171] (48) A base other than a C at position 3 of the sense strand.

[0172] (49) A C base at position 4 of the sense strand.

[0173] (50) A base other than a C at position 5 of the sense strand.

[0174] (51) A base other than a C at position 6 of the sense strand.

[0175] (52) A base other than a C at position 7 of the sense strand.

[0176] (53) A base other than a C at position 8 of the sense strand.

[0177] (54) A C base at position 9 of the sense strand.

[0178] (55) A C base at position 10 of the sense strand.

[0179] (56) A C base at position 11 of the sense strand.

[0180] (57) A base other than a C at position 12 of the sense strand.

[0181] (58) A base other than a C at position 13 of the sense strand.

[0182] (59) A base other than a C at position 14 of the sense strand.

[0183] (60) A base other than a C at position 15 of the sense strand.

[0184] (61) A base other than a C at position 16 of the sense strand.

[0185] (62) A base other than a C at position 17 of the sense strand.

[0186] (63) A base other than a C at position 18 of the sense strand.

[0187] (64) A G base at position 1 of the sense strand.

[0188] (65) A G base at position 2 of the sense strand.

[0189] (66) A G base at position 3 of the sense strand.

[0190] (67) A base other than a G at position 4 of the sense strand.

[0191] (68) A base other than a G at position 5 of the sense strand.

[0192] (69) A G base at position 6 of the sense strand.

[0193] (70) A G base at position 7 of the sense strand.

[0194] (71) A G base at position 8 of the sense strand.

[0195] (72) A G base at position 9 of the sense strand.

[0196] (73) A base other than a G at position 10 of the sense strand.

[0197] (74) A G base at position 11 of the sense strand.

[0198] (75) A G base at position 12 of the sense strand.

[0199] (76) A G base at position 14 of the sense strand.

[0200] (77) A G base at position 15 of the sense strand.

[0201] (78) A G base at position 16 of the sense strand.

[0202] (79) A base other than a G at position 17 of the sense strand.

[0203] (80) A base other than a G at position 18 of the sense strand.

[0204] (81) A base other than a G at position 19 of the sense strand.

[0205] The importance of various criteria can vary greatly. For instance, a C base at position 10 of the sense strand makes a minor contribution to duplex functionality. In contrast, the absence of a C at position 3 of the sense strand is very important. Accordingly, preferably an siRNA will satisfy as many of the aforementioned criteria as possible.

[0206] With respect to the criteria, GC content, as well as a high number of AU in positions 15-19 of the sense strand, may be important for easement of the unwinding of double stranded siRNA duplex. Duplex unwinding has been shown to be crucial for siRNA functionality in vivo.

[0207] With respect to criterion 9, the internal structure is measured in terms of the melting temperature of the single strand of siRNA, which is the temperature at which 50% of the molecules will become denatured. With respect to criteria 2-8 and 10-11, the positions refer to sequence positions on the sense strand, which is the strand that is identical to the mRNA.

[0208] In one preferred embodiment, at least criteria 1 and 8 are satisfied. In another preferred embodiment, at least criteria 7 and 8 are satisfied. In still another preferred embodiment, at least criteria 1, 8 and 9 are satisfied.

[0209] It should be noted that all of the aforementioned criteria regarding sequence position specifics are with respect to the 5′ end of the sense strand. Reference is made to the sense strand, because most databases contain information that describes the information of the mRNA. Because according to the present invention a chain can be from 18 to 30 bases in length, and the aforementioned criteria assumes a chain 19 base pairs in length, it is important to keep the aforementioned criteria applicable to the correct bases.

[0210] When there are only 18 bases, the base pair that is not present is the base pair that is located at the 3′ of the sense strand. When there are twenty to thirty bases present, then additional bases are added at the 5′ end of the sense chain and occupy positions −1 to −11. Accordingly, with respect to SEQ. ID NO. 0001 NNANANNNNUCNAANNNNA and SEQ. ID NO. 0028 GUCNNANANNNNUCNAANNNNA, both would have A at position 3, A at position 5, U at position 10, C at position 11, A and position 13, A and position 14 and A at position 19. However, SEQ. ID NO. 0028 would also have C at position −1, U at position −2 and G at position −3.

[0211] For a 19 base pair siRNA, an optimal sequence of one of the strands may be represented below, where N is any base, A, C, G, or U:

| | |
|---|---|
| SEQ. ID NO. 0001. | NNANANNNNUCNAANNNNA |
| SEQ. ID NO. 0002. | NNANANNNNUGNAANNNNA |
| SEQ. ID NO. 0003. | NNANANNNNUUNAANNNNA |
| SEQ. ID NO. 0004. | NNANANNNNUCNCANNNNA |
| SEQ. ID NO. 0005. | NNANANNNNUGNCANNNNA |
| SEQ. ID NO. 0006. | NNANANNNNUUNCANNNNA |
| SEQ. ID NO. 0007. | NNANANNNNUCNUANNNNA |
| SEQ. ID NO. 0008. | NNANANNNNUGNUANNNNA |
| SEQ. ID NO. 0009. | NNANANNNNUUNUANNNNA |
| SEQ. ID NO. 0010. | NNANCNNNNUCNAANNNNA |
| SEQ. ID NO. 0011. | NNANCNNNNUGNAANNNNA |
| SEQ. ID NO. 0012. | NNANCNNNNUUNAANNNNA |
| SEQ. ID NO. 0013. | NNANCNNNNUCNCANNNNA |
| SEQ. ID NO. 0014. | NNANCNNNNUGNCANNNNA |
| SEQ. ID NO. 0015. | NNANCNNNNUUNCANNNNA |
| SEQ. ID NO. 0016. | NNANCNNNNUCNUANNNNA |
| SEQ. ID NO. 0017. | NNANCNNNNUGNUANNNNA |
| SEQ. ID NO. 0018. | NNANCNNNNUUNUANNNNA |
| SEQ. ID NO. 0019. | NNANGNNNNUCNAANNNNA |
| SEQ. ID NO. 0020. | NNANGNNNNUGNAANNNNA |
| SEQ. ID NO. 0021. | NNANGNNNNUUNAANNNNA |
| SEQ. ID NO. 0022. | NNANGNNNNUCNCANNNNA |
| SEQ. ID NO. 0023. | NNANGNNNNUGNCANNNNA |
| SEQ. ID NO. 0024. | NNANGNNNNUUNCANNNNA |
| SEQ. ID NO. 0025. | NNANGNNNNUCNUANNNNA |
| SEQ. ID NO. 0026. | NNANGNNNNUGNUANNNNA |
| SEQ. ID NO. 0027. | NNANGNNNNNUNUANNNNA |

[0212] In one embodiment, the sequence used as an siRNA is selected by choosing the siRNA that score highest according to one of the following seven algorithms that are represented by Formulas I-VII:
Relative functionality of siRNA=−(GC/3)+(AU₁₅₋₁₉)−(Tm_{20° C.})*3−(G₁₃)*3−(C₁₉)+(A₁₉)*2+(A₃)+(U₁₀)+(A₁₄)−(U₅)−(A₁₁) Formula I
Relative functionality of siRNA=−(GC/3)−(AU₁₅₋₁₉)*3−(G₁₃)*3−(C₁₉)+(A₁₉)*2+(A₃) Formula II
Relative functionality of siRNA=−(GC/3)+(AU₁₅₋₁₉)−(Tm_{20° C.})*3 Formula III
Relative functionality of siRNA=−GC/2+(AU₁₅₋₁₉)/2−(Tm_{20° C.)*}2−(G₁₃)*3−(C₁₉)+(A₁₉)*2+(A₃)+(U₁₀)+(A₁₄)−(U₅)−(A₁₁) Formula IV
Relative functionality of siRNA=−(G₁₃)*3−(C₁₉)+(A₁₉)*2+(A₃)+(U₁₀)+(A₁₄)−(U₅)−(A₁₁) Formula V
Relative functionality of siRNA=−(G₁₃)*3−(C₁₉)+(A₁₉)*2+(A₃) Formula VI
Relative functionality of siRNA=−(GC/2)+(AU₁₅₋₁₉)/2−(Tm_{20° C.})*1−(G₁₃)*3−(C₁₉)+(A₁₉)*3+(A₃)*3+(U₁₀)/2+(A₁₄)/2−(U₅)/2−(A₁₁)/2 Formula VII

[0213] In Formulas I-VII:

[0214] wherein A₁₉=1 if A is the base at position 19 on the sense strand, otherwise its value is 0,

[0215] AU₁₅₋₁₉=0-5 depending on the number of A or U bases on the sense strand at positions 15-19;

[0216] G₁₃=1 if G is the base at position 13 on the sense strand, otherwise its value is 0;

[0217] C₁₉=1 if C is the base at position 19 of the sense strand, otherwise its value is 0;

[0218] GC=the number of G and C bases in the entire sense strand;

[0219] Tm_{20° C.}=1 if the Tm is greater than 20° C.;

A₃=1 if A is the base at position 3 on the sense strand, otherwise its value is 0;

U₁₀=1 if U is the base at position 10 on the sense strand, otherwise its value is 0;

A₁₄=1 if A is the base at position 14 on the sense strand, otherwise its value is 0;

U₅=1 if U is the base at position 5 on the sense strand, otherwise its value is 0; and

A₁₁=1 if A is the base at position 11 of the sense strand, otherwise its value is 0.

[0220] Formulas I-VII provide relative information regarding functionality. When the values for two sequences are compared for a given formula, the relative functionality is ascertained; a higher positive number indicates a greater functionality. For example, in many applications a value of 5 or greater is beneficial.

[0221] Additionally, in many applications, more than one of these formulas would provide useful information as to the relative functionality of potential siRNA sequences. However, it is beneficial to have more than one type of formula, because not every formula will be able to help to differentiate among potential siRNA sequences. For example, in particularly high GC mRNAs, formulas that take that parameter into account would not be useful and application of formulas that lack GC elements (e.g., formulas V and VI) might provide greater insights into duplex functionality. Similarly, formula II might by used in situations where hairpin structures are not observed in duplexes, and formula IV might be applicable for sequences that have higher AU content. Thus, one may consider a particular sequence in light of more than one or even all of these algorithms to obtain the best differentiation among sequences. In some instances, application of a given algorithm may identify an unusually large number of potential siRNA sequences, and in those cases, it may be appropriate to re-analyze that sequence with a second algorithm that is, for instance, more stringent. Alternatively, it is conceivable that analysis of a sequence with a given formula yields no acceptable siRNA sequences (i.e. low SMARTSCORES™, or siRNA ranking). In this instance, it may be appropriate to re-analyze that sequences with a second algorithm that is, for instance, less stringent. In still other instances, analysis of a single sequence with two separate formulas may give rise to conflicting results (i.e. one formula generates a set of siRNA with high SMARTSCORES™, or siRNA ranking, while the other formula identifies a set of siRNA with low SMARTSCORES™, or siRNA ranking). In these instances, it may be necessary to determine which weighted factor(s) (e.g. GC content) are contributing to the discrepancy and assessing the sequence to decide whether these factors should or should not be included. Alternatively, the sequence could be analyzed by a third, fourth, or fifth algorithm to identify a set of rationally designed siRNA.

[0222] The above-referenced criteria are particularly advantageous when used in combination with pooling techniques as depicted in Table I:

TABLE I
FUNCTIONAL PROBABILITY

| | OLIGOS | | | POOLS | | |
|---|---|---|---|---|---|---|
| CRITERIA | >95% | >80% | <70% | >95% | >80% | <70% |
| CURRENT | 33.0 | 50.0 | 23.0 | 79.5 | 97.3 | 0.3 |
| NEW | 50.0 | 88.5 | 8.0 | 93.8 | 99.98 | 0.005 |
| (GC) | 28.0 | 58.9 | 36.0 | 72.8 | 97.1 | 1.6 |

[0223] The term “current” used in Table I refers to Tuschl's conventional siRNA parameters (Elbashir, S. M. et al. (2002) “Analysis of gene function in somatic mammalian cells using small interfering RNAs” Methods 26: 199-213). “New” refers to the design parameters described in Formulas I-VII. “GC” refers to criteria that select siRNA solely on the basis of GC content.

[0224] As Table I indicates, when more functional siRNA duplexes are chosen, siRNAs that produce <70% silencing drops from 23% to 8% and the number of siRNA duplexes that produce >80% silencing rises from 50% to 88.5%. Further, of the siRNA duplexes with >80% silencing, a larger portion of these siRNAs actually silence >95% of the target expression (the new criteria increases the portion from 33% to 50%). Using this new criteria in pooled siRNAs, shows that, with pooling, the amount of silencing >95% increases from 79.5% to 93.8% and essentially eliminates any siRNA pool from silencing less than 70%.

[0225] Table II similarly shows the particularly beneficial results of pooling in combination with the aforementioned criteria. However, Table II, which takes into account each of the aforementioned variables, demonstrates even a greater degree of improvement in functionality.

TABLE II
FUNCTIONAL PROBABILITY

| | OLIGOS | | | POOLS | | |
|---|---|---|---|---|---|---|
| | | | NON- | | | NON- |
| | FUNCTIONAL | AVERAGE | FUNCTIONAL | FUNCTIONAL | AVERAGE | FUNCTIONAL |
| RANDOM | 20 | 40 | 50 | 67 | 97 | 3 |
| CRITERIA 1 | 52 | 99 | 0.1 | 97 | 93 | 0.0040 |
| CRITERIA 4 | 89 | 99 | 0.1 | 99 | 99 | 0.0000 |

[0226] The terms “functional,” “Average,” and “Non-functional” used in Table II, refer to siRNA that exhibit >80%, >50%, and <50% functionality, respectively. Criteria 1 and 4 refer to specific criteria described above.

[0227] The above-described algorithms may be used with or without a computer program that allows for the inputting of the sequence of the mRNA and automatically outputs the optimal siRNA. The computer program may, for example, be accessible from a local terminal or personal computer, over an internal network or over the Internet.

[0228] In addition to the formulas above, more detailed algorithms may be used for selecting siRNA. Preferably, at least one RNA duplex of 18-30 base pairs is selected such that it is optimized according a formula selected from:
(−14)*G₁₃−13*A₁−12*U₇−11*U₂−10*A₁₁−10*U₄−10*C₃−10*C₅−10*C₆−9*A₁₀−9*U₉−9*C₁₈−8*G₁₀−7*U₁−7*U₁₆−7*C₁₇−7*C₁₉+7*U₁₇+8*A₂+8*A₄+8*A₅+8*C₄+9*G₈+10*A₇+10*U₁₈+11*A₁₉+11*C₉+15*G₁+18*A₃+19*U₁₀−Tm−3*(GCₜₒₜₐₗ₎₋6*(GC₁₅₋₁₉)−30*X; and Formula VIII
(14.1)*A₃+(14.9)*A₆+(17.6)*A₁₃+(24.7)*A₁₉+(14.2)*U₁₀+(10.5)*C₉+(23.9)*G₁+(16.3)*G₂+(−12.3)*A₁₁+(−19.3)*U₁+(−12.1)*U₂+(−11)*U₃+(−15.2)*U₁₅+(−11.3)*U₁₆+(−11.8)*C₃+(−17.4)*C₆+(−10.5)*C₇+(−13.7)*G₁₃+(−25.9)*G₁₉−Tm−3*(GCₜₒₜₐₗ)−6*(GC₁₅₋₁₉)−30*X; and Formula IX
(−8)*A1+(−1)*A2+(12)*A3+(7)*A4+(18)*A5+(12)*A6+(19)*A7+(6)*A8+(−4)*A9+(−5)*A10+(−2)*A11+(−5)*A12+(17)*A13+(−3)*A14+(4)*A15+(2)*A16+(8)*A17+(11)*A18+(30)*A19+(−13)*U1+(−10)*U2+(2)*U3+(−2)*U4+(−5)*U5+(5)*U6+(−2)*U7+(−10)*U8+(−5)*U9+(15)*U10+(−1)*U11+(0)*U12+(10)*U13+(−9)*U14+(−13)*U15+(−10)*U16+(3)*U17+(9)*U18+(9)*U19+(7)*C1+(3)*C2+(−21)*C3+(5)*C4+(−9)*C5+(−20)*C6+(−18)*C7+(−5)*C8+(5)*C9+(1)*C10+(2)*C11+(−5)*C12+(−3)*C13+(−6)*C14+(−2)*C15+(−5)*C16+(−3)*C17+(−12)*C18+(−18)*C19+(14)*G1+(8)*G2+(7)*G3+(−10)*G4+(−4)*G5+(2)*G6+(1)*G7+(9)*G8+(5)*G9+(−11)*G10+(1)*G11+(9)*G12+(−24)*G13+(18)*G14+(11)*G15+(13)*G16+(−7)*G17+(−9)*G18+(−22)*G19+6*(number of A+U in position 15-19)−3*(number of G+C in whole siRNA). Formula X

[0229] wherein

[0230] A₁=1 if A is the base at position 1 of the sense strand, otherwise its value is 0;

A₂=1 if A is the base at position 2 of the sense strand, otherwise its value is 0;

A₃=1 if A is the base at position 3 of the sense strand, otherwise its value is 0;

A₄=1 if A is the base at position 4 of the sense strand, otherwise its value is 0;

A₅=1 if A is the base at position 5 of the sense strand, otherwise its value is 0;

A₆=1 if A is the base at position 6 of the sense strand, otherwise its value is 0;

A₇=1 if A is the base at position 7 of the sense strand, otherwise its value is 0;

A₁₀=1 if A is the base at position 10 of the sense strand, otherwise its value is 0;

A₁₁=1 if A is the base at position 11 of the sense strand, otherwise its value is 0;

A₁₃=1 if A is the base at position 13 of the sense strand, otherwise its value is 0;

A₁₉=1 if A is the base at position 19 of the sense strand, otherwise if another base is present or the sense strand is only 18 base pairs in length, its value is 0;

C₃=1 if C is the base at position 3 of the sense strand, otherwise its value is 0;

C₄=1 if C is the base at position 4 of the sense strand, otherwise its value is 0;

C₅=1 if C is the base at position 5 of the sense strand, otherwise its value is 0;

C₆=1 if C is the base at position 6 of the sense strand, otherwise its value is 0;

C₇=1 if C is the base at position 7 of the sense strand, otherwise its value is 0;

C₉=1 if C is the base at position 9 of the sense strand, otherwise its value is 0;

C₁₇=1 if C is the base at position 17 of the sense strand, otherwise its value is 0;

C₁₈=1 if C is the base at position 18 of the sense strand, otherwise its value is 0;

C₁₉=1 if C is the base at position 19 of the sense strand, otherwise if another base is present or the sense strand is only 18 base pairs in length, its value is 0;

[0231] G₁=1 if G is the base at position 1 on the sense strand, otherwise its value is 0;

G₂=1 if G is the base at position 2 of the sense strand, otherwise its value is 0;

G₈=1 if G is the base at position 8 on the sense strand, otherwise its value is 0;

G₁₀=1 if G is the base at position 10 on the sense strand, otherwise its value is 0;

G₁₃=1 if G is the base at position 13 on the sense strand, otherwise its value is 0;

G₁₉=1 if G is the base at position 19 of the sense strand, otherwise if another base is present or the sense strand is only 18 base pairs in length, its value is 0;

[0232] U₁=1 if U is the base at position 1 on the sense strand, otherwise its value is 0;

U₂=1 if U is the base at position 2 on the sense strand, otherwise its value is 0;

U₃=1 if U is the base at position 3 on the sense strand, otherwise its value is 0;

U₄=1 if U is the base at position 4 on the sense strand, otherwise its value is 0;

U₇=1 if U is the base at position 7 on the sense strand, otherwise its value is 0;

U₉=1 if U is the base at position 9 on the sense strand, otherwise its value is 0;

U₁₀=1 if U is the base at position 10 on the sense strand, otherwise its value is 0;

U₁₅=1 if U is the base at position 15 on the sense strand, otherwise its value is 0;

U₁₆=1 if U is the base at position 16 on the sense strand, otherwise its value is 0;

U₁₇=1 if U is the base at position 17 on the sense strand, otherwise its value is 0;

U₁₈=1 if U is the base at position 18 on the sense strand, otherwise its value is 0;

[0233] GC₁₅₋₁₉=the number of G and C bases within positions 15-19 of the sense strand, or within positions 15-18 if the sense strand is only 18 base pairs in length;

[0234] GCₜₒₜₐₗ=the number of G and C bases in the sense strand;

[0235] Tm=100 if the siRNA oligo has the internal repeat longer then 4 base pairs, otherwise its value is 0; and

[0236] X=the number of times that the same nucleotide repeats four or more times in a row.

[0237] The above formulas VIII, IX, and X, as well as formulas I-VII, provide methods for selecting siRNA in order to increase the efficiency of gene silencing. A subset of variables of any of the formulas may be used, though when fewer variables are used, the optimization hierarchy becomes less reliable.

[0238] With respect to the variables of the above-referenced formulas, a single letter of A or C or G or U followed by a subscript refers to a binary condition. The binary condition is that either the particular base is present at that particular position (wherein the value is “1”) or the base is not present (wherein the value is “0”). Because position 19 is optional, i.e., there might be only 18 base pairs, when there are only 18 base pairs, any base with a subscript of 19 in the formulas above would have a zero value for that parameter. Before or after each variable is a number followed by *, which indicates that the value of the variable is to be multiplied or weighed by that number.

[0239] The numbers preceding the variables A, or G, or C, or U in Formulas VIII, IX, and X (or after the variables in Formula I-VII) were determined by comparing the difference in the frequency of individual bases at different positions in functional siRNA and total siRNA. Specifically, the frequency in which a given base was observed at a particular position in functional groups was compared with the frequency that that same base was observed in the total, randomly selected siRNA set. If the absolute value of the difference between the functional and total values was found to be greater than 6%, that parameter was included in the equation. Thus, for instance, if the frequency of finding a “G” at position 13 (G₁₃) is found to be 6% in a given functional group, and the frequency of G₁₃ in the total population of siRNAs is 20%, the difference between the two values is 6%-20%=−14%. As the absolute value is greater than six (6), this factor (−14) is included in the equation. Thus, in Formula VIII, in cases where the siRNA under study has a G in position 13, the accrued value is (−14)*(1)=−14. In contrast, when a base other than G is found at position 13, the accrued value is (−14)*(0)=0.

[0240] When developing a means to optimize siRNAs, the inventors observed that a bias toward low internal thermodynamic stability of the duplex at the 5′-antisense (AS) end is characteristic of naturally occurring miRNA precursors. The inventors extended this observation to siRNAs for which functionality had been assessed in tissue culture.

[0241] With respect to the parameter GC₁₅₋₁₉, a value of 0-5 will be ascribed depending on the number of G or C bases at positions 15 to 19. If there are only 18 base pairs, the value is between 0 and 4.

[0242] With respect to the criterion GCₜₒₜₐₗ content, a number from 0-30 will be ascribed, which correlates to the total number of G and C nucleotides on the sense strand, excluding overhangs. Without wishing to be bound by any one theory, it is postulated that the significance of the GC content (as well as AU content at positions 15-19, which is a parameter for formulas III-VII) relates to the easement of the unwinding of a double-stranded siRNA duplex. Duplex unwinding is believed to be crucial for siRNA functionality in vivo and overall low internal stability, especially low internal stability of the first unwound base pair is believed to be important to maintain sufficient processivity of RISC complex-induced duplex unwinding. If the duplex has 19 base pairs, those at positions 15-19 on the sense strand will unwind first if the molecule exhibits a sufficiently low internal stability at that position. As persons skilled in the art are aware, RISC is a complex of approximately twelve proteins; Dicer is one, but not the only, helicase within this complex. Accordingly, although the GC parameters are believed to relate to activity with Dicer, they are also important for activity with other RISC proteins.

[0243] The value of the parameter Tm is 0 when there are no internal repeats longer than (or equal to) four base pairs present in the siRNA duplex; otherwise the value is 1. Thus for example, if the sequence ACGUACGU, or any other four nucleotide (or more) palindrome exists within the structure, the value will be one (1). Alternatively if the structure ACGGACG, or any other 3 nucleotide (or less) palindrome exists, the value will be zero (0).

[0244] The variable “X” refers to the number of times that the same nucleotide occurs contiguously in a stretch of four or more units. If there are, for example, four contiguous As in one part of the sequence and elsewhere in the sequence four contiguous Cs, X=2. Further, if there are two separate contiguous stretches of four of the same nucleotides or eight or more of the same nucleotides in a row, then X=2. However, X does not increase for five, six or seven contiguous nucleotides.

[0245] Again, when applying Formula VIII, Formula IX, or Formula X, to a given mRNA, (the “target RNA” or “target molecule”), one may use a computer program to evaluate the criteria for every sequence of 18-30 base pairs or only sequences of a fixed length, e.g., 19 base pairs. Preferably the computer program is designed such that it provides a report ranking of all of the potential siRNAs 18-30 base pairs, ranked according to which sequences generate the highest value. A higher value refers to a more efficient siRNA for a particular target gene. The computer program that may be used may be developed in any computer language that is known to be useful for scoring nucleotide sequences, or it may be developed with the assistance of commercially available product such as Microsoft's PRODUCT.NET. Additionally, rather than run every sequence through one and/or another formula, one may compare a subset of the sequences, which may be desirable if for example only a subset are available. For instance, it may be desirable to first perform a BLAST (Basic Local Alignment Search Tool) search and to identify sequences that have no homology to other targets. Alternatively, it may be desirable to scan the sequence and to identify regions of moderate GC context, then perform relevant calculations using one of the above-described formulas on these regions. These calculations can be done manually or with the aid of a computer.

[0246] As with Formulas I-VII, either Formula VIII, Formula IX, or Formula X may be used for a given mRNA target sequence. However, it is possible that according to one or the other formula more than one siRNA will have the same value. Accordingly, it is beneficial to have a second formula by which to differentiate sequences. Formulas IX and X were derived in a similar fashion as Formula VIII, yet used a larger data set and thus yields sequences with higher statistical correlations to highly functional duplexes. The sequence that has the highest value ascribed to it may be referred to as a “first optimized duplex.” The sequence that has the second highest value ascribed to it may be referred to as a “second optimized duplex.” Similarly, the sequences that have the third and fourth highest values ascribed to them may be referred to as a third optimized duplex and a fourth optimized duplex, respectively. When more than one sequence has the same value, each of them may, for example, be referred to as first optimized duplex sequences or co-first optimized duplexes. Formula X is similar to Formula IX, yet uses a greater numbers of variables and for that reason, identifies sequences on the basis of slightly different criteria.

[0247] It should also be noted that the output of a particular algorithm will depend on several of variables including: (1) the size of the data base(s) being analyzed by the algorithm, and (2) the number and stringency of the parameters being applied to screen each sequence. Thus, for example, in U.S. patent application Ser. No. 10/714,333, entitled “Functional and Hyperfunctional siRNA,” filed Nov. 14, 2003, Formula VIII was applied to the known human genome (NCBI REFSEQ database) through ENTREZ (EFETCH). As a result of these procedures, roughly 1.6 million siRNA sequences were identified. Application of Formula VIII to the same database in March of 2004 yielded roughly 2.2 million sequences, a difference of approximately 600,000 sequences resulting from the growth of the database over the course of the months that span this period of time. Application of other formulas (e.g., Formula X) that change the emphasis of, include, or eliminate different variables can yield unequal numbers of siRNAs. Alternatively, in cases where application of one formula to one or more genes fails to yield sufficient numbers of siRNAs with scores that would be indicative of strong silencing, said genes can be reassessed with a second algorithm that is, for instance, less stringent.

[0248] siRNA sequences identified using Formula VIII and Formula X (minus sequences generated by Formula VIII) are contained within the sequence listing. The data included in the sequence listing is described more fully below. The sequences identified by Formula VIII and Formula X that are disclosed in the sequence listing may be used in gene silencing applications.

[0249] It should be noted that for Formulas VIII, IX, and X all of the aforementioned criteria are identified as positions on the sense strand when oriented in the 5′ to 3′ direction as they are identified in connection with Formulas I-VII unless otherwise specified.

[0250] Formulas I-X, may be used to select or to evaluate one, or more than one, siRNA in order to optimize silencing. Preferably, at least two optimized siRNAs that have been selected according to at least one of these formulas are used to silence a gene, more preferably at least three and most preferably at least four. The siRNAs may be used individually or together in a pool or kit. Further, they may be applied to a cell simultaneously or separately. Preferably, the at least two siRNAs are applied simultaneously. Pools are particularly beneficial for many research applications. However, for therapeutics, it may be more desirable to employ a single hyperfunctional siRNA as described elsewhere in this application.

[0251] When planning to conduct gene silencing, and it is necessary to choose between two or more siRNAs, one should do so by comparing the relative values when the siRNA are subjected to one of the formulas above. In general a higher scored siRNA should be used.

[0252] Useful applications include, but are not limited to, target validation, gene functional analysis, research and drug discovery, gene therapy and therapeutics. Methods for using siRNA in these applications are well known to persons of skill in the art.

[0253] Because the ability of siRNA to function is dependent on the sequence of the RNA and not the species into which it is introduced, the present invention is applicable across a broad range of species, including but not limited to all mammalian species, such as humans, dogs, horses, cats, cows, mice, hamsters, chimpanzees and gorillas, as well as other species and organisms such as bacteria, viruses, insects, plants and C. elegans.

[0254] The present invention is also applicable for use for silencing a broad range of genes, including but not limited to the roughly 45,000 genes of a human genome, and has particular relevance in cases where those genes are associated with diseases such as diabetes, Alzheimer's, cancer, as well as all genes in the genomes of the aforementioned organisms.

[0255] The siRNA selected according to the aforementioned criteria or one of the aforementioned algorithms are also, for example, useful in the simultaneous screening and functional analysis of multiple genes and gene families using high throughput strategies, as well as in direct gene suppression or silencing.

Development of the Algorithms

[0256] To identify siRNA sequence features that promote functionality and to quantify the importance of certain currently accepted conventional factors—such as G/C content and target site accessibility—the inventors synthesized an siRNA panel consisting of 270 siRNAs targeting three genes, Human Cyclophilin, Firefly Luciferase, and Human DBI. In all three cases, siRNAs were directed against specific regions of each gene. For Human Cyclophilin and Firefly Luciferase, ninety siRNAs were directed against a 199 bp segment of each respective mRNA. For DBI, 90 siRNAs were directed against a smaller, 109 base pair region of the mRNA. The sequences to which the siRNAs were directed are provided below.

[0257] It should be noted that in certain sequences, “t” is present. This is because many databases contain information in this manner. However, the t denotes a uracil residue in mRNA and siRNA. Any algorithm will, unless otherwise specified, process at in a sequence as a u.

[0258] Human Cyclophilin: 193-390, M60857

SEQ. ID NO. 29:
gttccaaaaa cagtggataa ttttgtggcc ttagctacag
gagagaaagg atttggctac aaaaacagca aattccatcg
tgtaatcaag gacttcatga tccagggcgg agacttcacc
aggggagatg gcacaggagg aaagagcatc tacggtgagc
gcttccccga tgagaacttc aaactgaagc actacgggcc
tggctggg

[0259] Firefly Luciferase: 1434-1631, U47298 (pGL3, Promega)

SEQ. ID NO. 30:
tgaacttccc gccgccgttq ttgttttgga gcacggaaag
acgatgacgg aaaaagagat cgtggattac gtcgccagtc
aagtaacaac cgcgaaaaag ttgcgcggag gagttgtgtt
tgtggacgaa gtaccgaaag gtcttaccgg aaaactcgac
gcaagaaaaa toagagagat cctcataaag gccaagaagg

[0260] DBI, NM_{—}020548 (202-310) (Every Position)

SEQ. ID NO. 0031:
acgggcaagg ccaagtggga tgcctggaat gagctgaaag
ggacttccaa ggaagatgcc atgaaagctt acatcaacaa
agtagaagag ctaaagaaaa aatacggg

[0261] A list of the siRNAs appears in Table III (see Examples Section, Example II)

[0262] The set of duplexes was analyzed to identify correlations between siRNA functionality and other biophysical or thermodynamic properties. When the siRNA panel was analyzed in functional and non-functional subgroups, certain nucleotides were much more abundant at certain positions in functional or non-functional groups. More specifically, the frequency of each nucleotide at each position in highly functional siRNA duplexes was compared with that of nonfunctional duplexes in order to assess the preference for or against any given nucleotide at every position. These analyses were used to determine important criteria to be included in the siRNA algorithms (Formulas VIII, IX, and X).

[0263] The data set was also analyzed for distinguishing biophysical properties of siRNAs in the functional group, such as optimal percent of GC content, propensity for internal structures and regional thermodynamic stability. Of the presented criteria, several are involved in duplex recognition, RISC activation/duplex unwinding, and target cleavage catalysis.

[0264] The original data set that was the source of the statistically derived criteria is shown in FIG. 2. Additionally, this figure shows that random selection yields siRNA duplexes with unpredictable and widely varying silencing potencies as measured in tissue culture using HEK293 cells. In the figure, duplexes are plotted such that each x-axis tick-mark represents an individual siRNA, with each subsequent siRNA differing in target position by two nucleotides for Human Cyclophilin B and Firefly Luciferase, and by one nucleotide for Human DBI. Furthermore, the y-axis denotes the level of target expression remaining after transfection of the duplex into cells and subsequent silencing of the target.

[0265] siRNA identified and optimized in this document work equally well in a wide range of cell types. FIG. 3a shows the evaluation of thirty siRNAs targeting the DBI gene in three cell lines derived from different tissues. Each DBI siRNA displays very similar functionality in HEK293 (ATCC, CRL-1573, human embryonic kidney), HeLa (ATCC, CCL-2, cervical epithelial adenocarcinoma) and DU145 (HTB-81, prostate) cells as determined by the B-DNA assay. Thus, siRNA functionality is determined by the primary sequence of the siRNA and not by the intracellular environment. Additionally, it should be noted that although the present invention provides for a determination of the functionality of siRNA for a given target, the same siRNA may silence more than one gene. For example, the complementary sequence of the silencing siRNA may be present in more than one gene. Accordingly, in these circumstances, it may be desirable not to use the siRNA with highest SMARTSCORE™, or siRNA ranking. In such circumstances, it may be desirable to use the siRNA with the next highest SMARTSCORE™, or siRNA ranking.

[0266] To determine the relevance of G/C content in siRNA function, the G/C content of each duplex in the panel was calculated and the functional classes of siRNAs (<F50, ≧F50, ≧F80, ≧F95 where F refers to the percent gene silencing) were sorted accordingly. The majority of the highly-functional siRNAs (≧F95) fell within the G/C content range of 36%-52% (FIG. 3B). Twice as many non-functional (<F50) duplexes fell within the high G/C content groups (>57% GC content) compared to the 36%-52% group. The group with extremely low GC content (26% or less) contained a higher proportion of non-functional siRNAs and no highly-functional siRNAs. The G/C content range of 30%-52% was therefore selected as Criterion I for siRNA functionality, consistent with the observation that a G/C range 30%-70% promotes efficient RNAi targeting. Application of this criterion alone provided only a marginal increase in the probability of selecting functional siRNAs from the panel: selection of F50 and F95 siRNAs was improved by 3.6% and 2.2%, respectively. The siRNA panel presented here permitted a more systematic analysis and quantification of the importance of this criterion than that used previously.

[0267] A relative measure of local internal stability is the A/U base pair (bp) content; therefore, the frequency of A/U bp was determined for each of the five terminal positions of the duplex (5′ sense (S)/5′ antisense (AS)) of all siRNAs in the panel. Duplexes were then categorized by the number of A/U bp in positions 1-5 and 15-19 of the sense strand. The thermodynamic flexibility of the duplex 5′-end (positions 1-5; S) did not appear to correlate appreciably with silencing potency, while that of the 3′-end (positions 15-19; S) correlated with efficient silencing. No duplexes lacking A/U bp in positions 15-19 were functional. The presence of one A/U bp in this region conferred some degree of functionality, but the presence of three or more A/Us was preferable and therefore defined as Criterion II. When applied to the test panel, only a marginal increase in the probability of functional siRNA selection was achieved: a 1.8% and 2.3% increase for F50 and F95 duplexes, respectively (Table IV).

[0268] The complementary strands of siRNAs that contain internal repeats or palindromes may form internal fold-back structures. These hairpin-like structures exist in equilibrium with the duplexed form effectively reducing the concentration of functional duplexes. The propensity to form internal hairpins and their relative stability can be estimated by predicted melting temperatures. High Tm reflects a tendency to form hairpin structures. Lower Tm values indicate a lesser tendency to form hairpins. When the functional classes of siRNAs were sorted by Tₘ (FIG. 3c), the following trends were identified: duplexes lacking stable internal repeats were the most potent silencers (no F95 duplex with predicted hairpin structure Tₘ>60° C.). In contrast, about 60% of the duplexes in the groups having internal hairpins with calculated Tₘ values less than 20° C. were F80. Thus, the stability of internal repeats is inversely proportional to the silencing effect and defines Criterion III (predicted hairpin structure Tₘ≦20° C.).

Sequence-Based Determinants of siRNA Functionality

[0269] When the siRNA panel was sorted into functional and non-functional groups, the frequency of a specific nucleotide at each position in a functional siRNA duplex was compared with that of a nonfunctional duplex in order to assess the preference for or against a certain nucleotide. FIG. 4 shows the results of these queries and the subsequent resorting of the data set (from FIG. 2). The data is separated into two sets: those duplexes that meet the criteria, a specific nucleotide in a certain position—grouped on the left (Selected) and those that do not—grouped on the right (Eliminated). The duplexes are further sorted from most functional to least functional with the y-axis of FIG. 4a-e representing the % expression i.e., the amount of silencing that is elicited by the duplex (Note: each position on the X-axis represents a different duplex). Statistical analysis revealed correlations between silencing and several sequence-related properties of siRNAs. FIG. 4 and Table IV show quantitative analysis for the following five sequence-related properties of siRNA: (A) an A at position 19 of the sense strand; (B) an A at position 3 of the sense strand; (C) a U at position 10 of the sense strand; (D) a base other than G at position 13 of the sense strand; and (E) a base other than C at position 19 of the sense strand.

[0270] When the siRNAs in the panel were evaluated for the presence of an A at position 19 of the sense strand, the percentage of non-functional duplexes decreased from 20% to 11.8%, and the percentage of F95 duplexes increased from 21.7% to 29.4% (Table IV). Thus, the presence of an A in this position defined Criterion IV.

[0271] Another sequence-related property correlated with silencing was the presence of an A in position 3 of the sense strand (FIG. 4b). Of the siRNAs with A3, 34.4% were F95, compared with 21.7% randomly selected siRNAs. The presence of a U base in position 10 of the sense strand exhibited an even greater impact (FIG. 4c). Of the duplexes in this group, 41.7% were F95. These properties became criteria V and VI, respectively.

[0272] Two negative sequence-related criteria that were identified also appear on FIG. 4. The absence of a G at position 13 of the sense strand, conferred a marginal increase in selecting functional duplexes (FIG. 4d). Similarly, lack of a C at position 19 of the sense strand also correlated with functionality (FIG. 4e). Thus, among functional duplexes, position 19 was most likely occupied by A, and rarely occupied by C. These rules were defined as criteria VII and VIII, respectively.

[0273] Application of each criterion individually provided marginal but statistically significant increases in the probability of selecting a potent siRNA. Although the results were informative, the inventors sought to maximize potency and therefore consider multiple criteria or parameters. Optimization is particularly important when developing therapeutics. Interestingly, the probability of selecting a functional siRNA based on each thermodynamic criteria was 2%-4% higher than random, but 4%-8% higher for the sequence-related determinates. Presumably, these sequence-related increases reflect the complexity of the RNAi mechanism and the multitude of protein-RNA interactions that are involved in RNAi-mediated silencing.

TABLE IV

| | PERCENT | | IMPROVEMENT |
|---|---|---|---|
| CRITERION | FUNCTIONAL | | OVER RANDOM (%) |
| I. 30%-52% G/C Content | <F50 | 16.4 | −3.6 |
| | ≧F50 | 83.6 | 3.6 |
| | ≧F80 | 60.4 | 4.3 |
| | ≧F95 | 23.9 | 2.2 |
| II. At least 3 A/U bases at | <F50 | 18.2 | −1.8 |
| positions 15-19 of the sense | ≧F50 | 81.8 | 1.8 |
| strand | ≧F80 | 59.7 | 3.6 |
| | ≧F95 | 24.0 | 2.3 |
| III. Absence of internal | <F50 | 16.7 | −3.3 |
| repeats, as measured by Tm of | ≧F50 | 83.3 | 3.3 |
| secondary structure ≦20° C. | ≧F80 | 61.1 | 5.0 |
| | ≧F95 | 24.6 | 2.9 |
| IV. An A base at position 19 | <F50 | 11.8 | −8.2 |
| of the sense strand | ≧F50 | 88.2 | 8.2 |
| | ≧F80 | 75.0 | 18.9 |
| | ≧F95 | 29.4 | 7.7 |
| V. An A base at position 3 of | <F50 | 17.2 | −2.8 |
| the sense strand | ≧F50 | 82.8 | 2.8 |
| | ≧F80 | 62.5 | 6.4 |
| | ≧F95 | 34.4 | 12.7 |
| VI. A U base at position 10 | <F50 | 13.9 | −6.1 |
| of the sense strand | ≧F50 | 86.1 | 6.1 |
| | ≧F80 | 69.4 | 13.3 |
| | ≧F95 | 41.7 | 20 |
| VII. A base other than C at | <F50 | 18.8 | −1.2 |
| position 19 of the sense strand | ≧F50 | 81.2 | 1.2 |
| | ≧F80 | 59.7 | 3.6 |
| | ≧F95 | 24.2 | 2.5 |
| VIII. A base other than G at | <F50 | 15.2 | −4.8 |
| position 13 of the sense strand | ≧F50 | 84.8 | 4.8 |
| | ≧F80 | 61.4 | 5.3 |
| | ≧F95 | 26.5 | 4.8 |

The siRNA Selection Algorithm

[0274] In an effort to improve selection further, all identified criteria, including but not limited to those listed in Table IV were combined into the algorithms embodied in Formula VIII, Formula IX, and Formula X. Each siRNA was then assigned a score (referred to as a SMARTSCORE™, or siRNA ranking) according to the values derived from the formulas. Duplexes that scored higher than 0 or −20 (unadjusted), for Formulas VIII and IX, respectively, effectively selected a set of functional siRNAs and excluded all non-functional siRNAs. Conversely, all duplexes scoring lower than 0 and −20 (minus 20) according to formulas VIII and IX, respectively, contained some functional siRNAs but included all non-functional siRNAs. A graphical representation of this selection is shown in FIG. 5. It should be noted that the scores derived from the algorithm can also be provided as “adjusted” scores. To convert Formula VIII unadjusted scores into adjusted scores it is necessary to use the following equation:
(160+unadjusted score)/2.25

[0275] When this takes place, an unadjusted score of “0” (zero) is converted to 75. Similarly, unadjusted scores for Formula X can be converted to adjusted scores. In this instance, the following equation is applied:
(228+unadjusted score)/3.56

[0276] When these manipulations take place, an unadjusted score of 38 is converted to an adjusted score of 75.

[0277] The methods for obtaining the seven criteria embodied in Table IV are illustrative of the results of the process used to develop the information for Formulas VIII, IX, and X. Thus similar techniques were used to establish the other variables and their multipliers. As described above, basic statistical methods were use to determine the relative values for these multipliers.

[0278] To determine the value for “Improvement over Random” the difference in the frequency of a given attribute (e.g., GC content, base preference) at a particular position is determined between individual functional groups (e.g., <F50) and the total siRNA population studied (e.g., 270 siRNA molecules selected randomly). Thus, for instance, in Criterion I (30%-52% GC content) members of the <F50 group were observed to have GC contents between 30-52% in 16.4% of the cases. In contrast, the total group of 270 siRNAs had GC contents in this range, 20% of the time. Thus for this particular attribute, there is a small negative correlation between 30%-52% GC content and this functional group (i.e., 16.4%-20%=−3.6%). Similarly, for Criterion VI, (a “U” at position 10 of the sense strand), the >F95 group contained a “U” at this position 41.7% of the time. In contrast, the total group of 270 siRNAs had a “U” at this position 21.7% of the time, thus the improvement over random is calculated to be 20% (or 41.7%-21.7%).

Identifying the Average Internal Stability Profile of Strong siRNA

[0279] In order to identify an internal stability profile that is characteristic of strong siRNA, 270 different siRNAs derived from the cyclophilin B, the diazepam binding inhibitor (DBI), and the luciferase gene were individually transfected into HEK293 cells and tested for their ability to induce RNAi of the respective gene. Based on their performance in the in vivo assay, the sequences were then subdivided into three groups, (i) >95% silencing; (ii) 80-95% silencing; and (iii) less than 50% silencing. Sequences exhibiting 51-84% silencing were eliminated from further consideration to reduce the difficulties in identifying relevant thermodynamic patterns.

[0280] Following the division of siRNA into three groups, a statistical analysis was performed on each member of each group to determine the average internal stability profile (AISP) of the siRNA. To accomplish this the Oligo 5.0 Primer Analysis Software and other related statistical packages (e.g., Excel) were exploited to determine the internal stability of pentamers using the nearest neighbor method described by Freier et al., (1986) Improved free-energy parameters for predictions of RNA duplex stability, Proc Natl. Acad. Sci. USA 83(24): 9373-7. Values for each group at each position were then averaged, and the resulting data were graphed on a linear coordinate system with the Y-axis expressing the AG (free energy) values in kcal/mole and the X-axis identifying the position of the base relative to the 5′ end.

[0281] The results of the analysis identified multiple key regions in siRNA molecules that were critical for successful gene silencing. At the 3′-most end of the sense strand (5′antisense), highly functional siRNA (>95% gene silencing, see FIG. 6a, >F95) have a low internal stability (AISP of position 19=˜−7.6 kcal/mol). In contrast low-efficiency siRNA (i.e., those exhibiting less than 50% silencing, <F50) display a distinctly different profile, having high ΔG values (˜−8.4 kcal/mol) for the same position. Moving in a 5′ (sense strand) direction, the internal stability of highly efficient siRNA rises (position 12=˜−8.3 kcal/mole) and then drops again (position 7=˜−7.7 kcal/mol) before leveling off at a value of approximately −8.1 kcal/mol for the 5′ terminus. siRNA with poor silencing capabilities show a distinctly different profile. While the AISP value at position 12 is nearly identical with that of strong siRNAs, the values at positions 7 and 8 rise considerably, peaking at a high of ˜−9.0 kcal/mol. In addition, at the 5′ end of the molecule the AISP profile of strong and weak siRNA differ dramatically. Unlike the relatively strong values exhibited by siRNA in the >95% silencing group, siRNAs that exhibit poor silencing activity have weak AISP values (−7.6, −7.5, and −7.5 kcal/mol for positions 1, 2 and 3 respectively).

[0282] Overall the profiles of both strong and weak siRNAs form distinct sinusoidal shapes that are roughly 180° out-of-phase with each other. While these thermodynamic descriptions define the archetypal profile of a strong siRNA, it will likely be the case that neither the ΔG values given for key positions in the profile or the absolute position of the profile along the Y-axis (i.e., the ΔG-axis) are absolutes. Profiles that are shifted upward or downward (i.e., having on an average, higher or lower values at every position) but retain the relative shape and position of the profile along the X-axis can be foreseen as being equally effective as the model profile described here. Moreover, it is likely that siRNA that have strong or even stronger gene-specific silencing effects might have exaggerated ΔG values (either higher or lower) at key positions. Thus, for instance, it is possible that the 5′-most position of the sense strand (position 19) could have ΔG values of 7.4 kcal/mol or lower and still be a strong siRNA if, for instance, a G-C→G-T/U mismatch were substituted at position 19 and altered duplex stability. Similarly, position 12 and position 7 could have values above 8.3 kcal/mol and below 7.7 kcal/mole, respectively, without abating the silencing effectiveness of the molecule. Thus, for instance, at position 12, a stabilizing chemical modification (e.g., a chemical modification of the 2′ position of the sugar backbone) could be added that increases the average internal stability at that position. Similarly, at position 7, mismatches similar to those described previously could be introduced that would lower the AG values at that position.

[0283] Lastly, it is important to note that while functional and non-functional siRNA were originally defined as those molecules having specific silencing properties, both broader or more limiting parameters can be used to define these molecules. As used herein, unless otherwise specified, “non-functional siRNA” are defined as those siRNA that induce less than 50% (<50%) target silencing, “semi-functional siRNA” induce 50-79% target silencing, “functional siRNA” are molecules that induce 80-95% gene silencing, and “highly-functional siRNA” are molecules that induce great than 95% gene silencing. These definitions are not intended to be rigid and can vary depending upon the design and needs of the application. For instance, it is possible that a researcher attempting to map a gene to a chromosome using a functional assay, may identify an siRNA that reduces gene activity by only 30%. While this level of gene silencing may be “non-functional” for, e.g., therapeutic needs, it is sufficient for gene mapping purposes and is, under these uses and conditions, “functional.” For these reasons, functional siRNA can be defined as those molecules having greater than 10%, 20%, 30%, 40%, 50%, 60%, 70%, 80%, or 90% silencing capabilities at 100 nM transfection conditions. Similarly, depending upon the needs of the study and/or application, non-functional and semi-functional siRNA can be defined as having different parameters. For instance, semi-functional siRNA can be defined as being those molecules that induce 20%, 30%, 40%, 50%, 60%, or 70% silencing at 100 nM transfection conditions. Similarly, non-functional siRNA can be defined as being those molecules that silence gene expression by less than 70%, 60%, 50%, 40%, 30%, or less. Nonetheless, unless otherwise stated, the descriptions stated in the “Definitions” section of this text should be applied.

[0284] Functional attributes can be assigned to each of the key positions in the AISP of strong siRNA. The low 5′ (sense strand) AISP values of strong siRNAs may be necessary for determining which end of the molecule enters the RISC complex. In contrast, the high and low AISP values observed in the central regions of the molecule may be critical for siRNA-target mRNA interactions and product release, respectively.

[0285] If the AISP values described above accurately define the thermodynamic parameters of strong siRNA, it would be expected that similar patterns would be observed in strong siRNA isolated from nature. Natural siRNAs exist in a harsh, RNase-rich environment and it can be hypothesized that only those siRNA that exhibit heightened affinity for RISC (i.e., siRNA that exhibit an average internal stability profile similar to those observed in strong siRNA) would survive in an intracellular environment. This hypothesis was tested using GFP-specific siRNA isolated from N. benthamiana. Llave et al. (2002) Endogenous and Silencing-Associated Small RNAs in Plants, The Plant Cell 14, 1605-1619, introduced long double-stranded GFP-encoding RNA into plants and subsequently re-isolated GFP-specific siRNA from the tissues. The AISP of fifty-nine of these GFP-siRNA were determined, averaged, and subsequently plotted alongside the AISP profile obtained from the cyclophilin B/DBI/luciferase siRNA having >90% silencing properties (FIG. 6b). Comparison of the two groups show that profiles are nearly identical. This finding validates the information provided by the internal stability profiles and demonstrates that: (1) the profile identified by analysis of the cyclophilin B/DBI/luciferase siRNAs are not gene specific; and (2) AISP values can be used to search for strong siRNAs in a variety of species.

[0286] Both chemical modifications and base-pair mismatches can be incorporated into siRNA to alter the duplex's AISP and functionality. For instance, introduction of mismatches at positions 1 or 2 of the sense strand destabilized the 5′ end of the sense strand and increases the functionality of the molecule (see Luc, FIG. 7). Similarly, addition of 2′-O-methyl groups to positions 1 and 2 of the sense strand can also alter the AISP and (as a result) increase both the functionality of the molecule and eliminate off-target effects that results from sense strand homology with the unrelated targets (FIG. 8).

Rationale for Criteria in a Biological Context

[0287] The fate of siRNA in the RNAi pathway may be described in 5 major steps: (1) duplex recognition and pre-RISC complex formation; (2) ATP-dependent duplex unwinding/strand selection and RISC activation; (3) mRNA target identification; (4) mRNA cleavage, and (5) product release (FIG. 1). Given the level of nucleic acid-protein interactions at each step, siRNA functionality is likely influenced by specific biophysical and molecular properties that promote efficient interactions within the context of the multi-component complexes. Indeed, the systematic analysis of the siRNA test set identified multiple factors that correlate well with functionality. When combined into a single algorithm, they proved to be very effective in selecting active siRNAs.

[0288] The factors described here may also be predictive of key functional associations important for each step in RNAi. For example, the potential formation of internal hairpin structures correlated negatively with siRNA functionality. Complementary strands with stable internal repeats are more likely to exist as stable hairpins thus decreasing the effective concentration of the functional duplex form. This suggests that the duplex is the preferred conformation for initial pre-RISC association. Indeed, although single complementary strands can induce gene silencing, the effective concentration required is at least two orders of magnitude higher than that of the duplex form.

[0289] siRNA-pre-RISC complex formation is followed by an ATP-dependent duplex unwinding step and “activation” of the RISC. The siRNA functionality was shown to correlate with overall low internal stability of the duplex and low internal stability of the 3′ sense end (or differential internal stability of the 3′ sense compare to the 5′ sense strand), which may reflect strand selection and entry into the RISC. Overall duplex stability and low internal stability at the 3′ end of the sense strand were also correlated with siRNA functionality. Interestingly, siRNAs with very high and very low overall stability profiles correlate strongly with non-functional duplexes. One interpretation is that high internal stability prevents efficient unwinding while very low stability reduces siRNA target affinity and subsequent mRNA cleavage by the RISC.

[0290] Several criteria describe base preferences at specific positions of the sense strand and are even more intriguing when considering their potential mechanistic roles in target recognition and mRNA cleavage. Base preferences for A at position 19 of the sense strand but not C, are particularly interesting because they reflect the same base preferences observed for naturally occurring miRNA precursors. That is, among the reported miRNA precursor sequences 75% contain a U at position 1 which corresponds to an A in position 19 of the sense strand of siRNAs, while G was under-represented in this same position for miRNA precursors. These observations support the hypothesis that both miRNA precursors and siRNA duplexes are processed by very similar if not identical protein machinery. The functional interpretation of the predominance of a U/A base pair is that it promotes flexibility at the 5′antisense ends of both siRNA duplexes and miRNA precursors and facilitates efficient unwinding and selective strand entrance into an activated RISC.

[0291] Among the criteria associated with base preferences that are likely to influence mRNA cleavage or possibly product release, the preference for U at position 10 of the sense strand exhibited the greatest impact, enhancing the probability of selecting an F80 sequence by 13.3%. Activated RISC preferentially cleaves target mRNA between nucleotides 10 and 11 relative to the 5′ end of the complementary targeting strand. Therefore, it may be that U, the preferred base for most endoribonucleases, at this position supports more efficient cleavage. Alternatively, a U/A bp between the targeting siRNA strand and its cognate target mRNA may create an optimal conformation for the RISC-associated “slicing” activity.

Post Algorithm Filters

[0292] According to another embodiment, the output of any one of the formulas previously listed can be filtered to remove or select for siRNAs containing undesirable or desirable motifs or properties, respectively. In one example, sequences identified by any of the formulas can be filtered to remove any and all sequences that induce toxicity or cellular stress. Introduction of an siRNA containing a toxic motif into a cell can induce cellular stress and/or cell death (apoptosis) which in turn can mislead researchers into associating a particular (e.g., nonessential) gene with, e.g., an essential function. Alternatively, sequences generated by any of the before mentioned formulas can be filtered to identify and retain duplexes that contain toxic motifs. Such duplexes may be valuable from a variety of perspectives including, for instance, uses as therapeutic molecules. A variety of toxic motifs exist and can exert their influence on the cell through RNAi and non-RNAi pathways. Examples of toxic motifs are explained more fully in commonly assigned U.S. Provisional Patent Application Ser. No. 60/538,874, entitled “Identification of Toxic Sequences,” filed Jan. 23, 2004. Briefly, toxic motifs include A/G UUU A/G/U, G/C AAA G/C, and GCCA, or a complement of any of the foregoing.

[0293] In another instance, sequences identified by any of the before mentioned formulas can be filtered to identify duplexes that contain motifs (or general properties) that provide serum stability or induce serum instability. In one envisioned application of siRNA as therapeutic molecules, duplexes targeting disease-associated genes will be introduced into patients intravenously. As the half-life of single and double stranded RNA in serum is short, post-algorithm filters designed to select molecules that contain motifs that enhance duplex stability in the presence of serum and/or (conversely) eliminate duplexes that contain motifs that destabilize siRNA in the presence of serum, would be beneficial.

[0294] In another instance, sequences identified by any of the before mentioned formulas can be filtered to identify duplexes that are hyperfunctional. Hyperfunctional sequences are defined as those sequences that (1) induce greater than 95% silencing of a specific target when they are transfected at subnanomolar concentrations (i.e., less than one nanomolar); and/or (2) induce functional (or better) levels of silencing for greater than 96 hours. Filters that identify hyperfunctional molecules can vary widely. In one example, the top ten, twenty, thirty, or forty siRNA can be assessed for the ability to silence a given target at, e.g., concentrations of 1 nM and 0.5 nM to identify hyperfunctional molecules.

Pooling

[0295] According to another embodiment, the present invention provides a pool of at least two siRNAs, preferably in the form of a kit or therapeutic reagent, wherein one strand of each of the siRNAs, the sense strand comprises a sequence that is substantially similar to a sequence within a target mRNA. The opposite strand, the antisense strand, will preferably comprise a sequence that is substantially complementary to that of the target mRNA. More preferably, one strand of each siRNA will comprise a sequence that is identical to a sequence that is contained in the target mRNA. Most preferably, each siRNA will be 19 base pairs in length, and one strand of each of the siRNAs will be 100% complementary to a portion of the target mRNA.

[0296] By increasing the number of siRNAs directed to a particular target using a pool or kit, one is able both to increase the likelihood that at least one siRNA with satisfactory functionality will be included, as well as to benefit from additive or synergistic effects. Further, when two or more siRNAs directed against a single gene do not have satisfactory levels of functionality alone, if combined, they may satisfactorily promote degradation of the target messenger RNA and successfully inhibit translation. By including multiple siRNAs in the system, not only is the probability of silencing increased, but the economics of operation are also improved when compared to adding different siRNAs sequentially. This effect is contrary to the conventional wisdom that the concurrent use of multiple siRNA will negatively impact gene silencing (e.g., Holen, T. et al. (2003) Similar behavior of single strand and double strand siRNAs suggests they act through a common RNAi pathway. NAR 31: 2401-21407).

[0297] In fact, when two siRNAs were pooled together, 54% of the pools of two siRNAs induced more than 95% gene silencing. Thus, a 2.5-fold increase in the percentage of functionality was achieved by randomly combining two siRNAs. Further, over 84% of pools containing two siRNAs induced more than 80% gene silencing.

[0298] More preferably, the kit is comprised of at least three siRNAs, wherein one strand of each siRNA comprises a sequence that is substantially similar to a sequence of the target mRNA and the other strand comprises a sequence that is substantially complementary to the region of the target mRNA. As with the kit that comprises at least two siRNAs, more preferably one strand will comprise a sequence that is identical to a sequence that is contained in the mRNA and another strand that is 100% complementary to a sequence that is contained in the mRNA. During experiments, when three siRNAs were combined together, 60% of the pools induced more than 95% gene silencing and 92% of the pools induced more than 80% gene silencing.

[0299] Further, even more preferably, the kit is comprised of at least four siRNAs, wherein one strand of each siRNA comprises a sequence that is substantially similar to a region of the sequence of the target mRNA, and the other strand comprises a sequence that is substantially complementary to the region of the target mRNA. As with the kit or pool that comprises at least two siRNAs, more preferably one strand of each of the siRNA duplexes will comprise a sequence that is identical to a sequence that is contained in the mRNA, and another strand that is 100% complementary to a sequence that is contained in the mRNA.

[0300] Additionally, kits and pools with at least five, at least six, and at least seven siRNAs may also be useful with the present invention. For example, pools of five siRNA induced 95% gene silencing with 77% probability and 80% silencing with 98.8% probability. Thus, pooling of siRNAs together can result in the creation of a target-specific silencing reagent with almost a 99% probability of being functional. The fact that such high levels of success are achievable using such pools of siRNA, enables one to dispense with costly and time-consuming target-specific validation procedures.

[0301] For this embodiment, as well as the other aforementioned embodiments, each of the siRNAs within a pool will preferably comprise 18-30 base pairs, more preferably 18-25 base pairs, and most preferably 19 base pairs. Within each siRNA, preferably at least 18 contiguous bases of the antisense strand will be 100% complementary to the target mRNA. More preferably, at least 19 contiguous bases of the antisense strand will be 100% complementary to the target mRNA. Additionally, there may be overhangs on either the sense strand or the antisense strand, and these overhangs may be at either the 5′ end or the 3′ end of either of the strands, for example there may be one or more overhangs of 1-6 bases. When overhangs are present, they are not included in the calculation of the number of base pairs. The two nucleotide 3′ overhangs mimic natural siRNAs and are commonly used but are not essential. Preferably, the overhangs should consist of two nucleotides, most often dTdT or UU at the 3′ end of the sense and antisense strand that are not complementary to the target sequence. The siRNAs may be produced by any method that is now known or that comes to be known for synthesizing double stranded RNA that one skilled in the art would appreciate would be useful in the present invention. Preferably, the siRNAs will be produced by Dharmacon's proprietary ACE® technology. However, other methods for synthesizing siRNAs are well known to persons skilled in the art and include, but are not limited to, any chemical synthesis of RNA oligonucleotides, ligation of shorter oligonucleotides, in vitro transcription of RNA oligonucleotides, the use of vectors for expression within cells, recombinant Dicer products and PCR products.

[0302] The siRNA duplexes within the aforementioned pools of siRNAs may correspond to overlapping sequences within a particular mRNA, or non-overlapping sequences of the mRNA. However, preferably they correspond to non-overlapping sequences. Further, each siRNA may be selected randomly, or one or more of the siRNA may be selected according to the criteria discussed above for maximizing the effectiveness of siRNA.

[0303] Included in the definition of siRNAs are siRNAs that contain substituted and/or labeled nucleotides that may, for example, be labeled by radioactivity, fluorescence or mass. The most common substitutions are at the 2′ position of the ribose sugar, where moieties such as H (hydrogen) F, NH₃, OCH₃ and other O— alkyl, alkenyl, alkynyl, and orthoesters, may be substituted, or in the phosphorous backbone, where sulfur, amines or hydrocarbons may be substituted for the bridging of non-bridging atoms in the phosphodiester bond. Examples of modified siRNAs are explained more fully in commonly assigned U.S. patent application Ser. No. 10/613,077, filed Jul. 1, 2003.

[0304] Additionally, as noted above, the cell type into which the siRNA is introduced may affect the ability of the siRNA to enter the cell; however, it does not appear to affect the ability of the siRNA to function once it enters the cell. Methods for introducing double-stranded RNA into various cell types are well known to persons skilled in the art.

[0305] As persons skilled in the art are aware, in certain species, the presence of proteins such as RdRP, the RNA-dependent RNA polymerase, may catalytically enhance the activity of the siRNA. For example, RdRP propagates the RNAi effect in C. elegans and other non-mammalian organisms. In fact, in organisms that contain these proteins, the siRNA may be inherited. Two other proteins that are well studied and known to be a part of the machinery are members of the Argonaute family and Dicer, as well as their homologues. There is also initial evidence that the RISC complex might be associated with the ribosome so the more efficiently translated mRNAs will be more susceptible to silencing than others.

[0306] Another very important factor in the efficacy of siRNA is mRNA localization. In general, only cytoplasmic mRNAs are considered to be accessible to RNAi to any appreciable degree. However, appropriately designed siRNAs, for example, siRNAs modified with internucleotide linkages or 2′-O-methyl groups, may be able to cause silencing by acting in the nucleus. Examples of these types of modifications are described in commonly assigned U.S. patent application Ser. Nos. 10/431,027 and 10/613,077.

[0307] As described above, even when one selects at least two siRNAs at random, the effectiveness of the two may be greater than one would predict based on the effectiveness of two individual siRNAs. This additive or synergistic effect is particularly noticeable as one increases to at least three siRNAs, and even more noticeable as one moves to at least four siRNAs. Surprisingly, the pooling of the non-functional and semi-functional siRNAs, particularly more than five siRNAs, can lead to a silencing mixture that is as effective if not more effective than any one particular functional siRNA.

[0308] Within the kits of the present invention, preferably each siRNA will be present in a concentration of between 0.001 and 200 μM, more preferably between 0.01 and 200 nM, and most preferably between 0.1 and 10 nM.

[0309] In addition to preferably comprising at least four or five siRNAs, the kits of the present invention will also preferably comprise a buffer to keep the siRNA duplex stable. Persons skilled in the art are aware of buffers suitable for keeping siRNA stable. For example, the buffer may be comprised of 100 mM KCl, 30 mM HEPES-pH 7.5, and 1 mM MgCl₂. Alternatively, kits might contain complementary strands that contain any one of a number of chemical modifications (e.g., a 2′-O-ACE) that protect the agents from degradation by nucleases. In this instance, the user may (or may not) remove the modifying protective group (e.g., deprotect) before annealing the two complementary strands together.

[0310] By way of example, the kits may be organized such that pools of siRNA duplexes are provided on an array or microarray of wells or drops for a particular gene set or for unrelated genes. The array may, for example, be in 96 wells, 384 wells or 1284 wells arrayed in a plastic plate or on a glass slide using techniques now known or that come to be known to persons skilled in the art. Within an array, preferably there will be controls such as functional anti-lamin A/C, cyclophilin and two siRNA duplexes that are not specific to the gene of interest.

[0311] In order to ensure stability of the siRNA pools prior to usage, they may be retained in lyophilized form at minus twenty degrees (−20° C.) until they are ready for use. Prior to usage, they should be resuspended; however, even once resuspended, for example, in the aforementioned buffer, they should be kept at minus twenty degrees, (−20° C.) until used. The aforementioned buffer, prior to use, may be stored at approximately 4° C. or room temperature. Effective temperatures at which to conduct transfections are well known to persons skilled in the art and include for example, room temperature.

[0312] The kits may be applied either in vivo or in vitro. Preferably, the siRNA of the pools or kits is applied to a cell through transfection, employing standard transfection protocols. These methods are well known to persons skilled in the art and include the use of lipid-based carriers, electroporation, cationic carriers, and microinjection. Further, one could apply the present invention by synthesizing equivalent DNA sequences (either as two separate, complementary strands, or as hairpin molecules) instead of siRNA sequences and introducing them into cells through vectors. Once in the cells, the cloned DNA could be transcribed, thereby forcing the cells to generate the siRNA. Examples of vectors suitable for use with the present application include but are not limited to the standard transient expression vectors, adenoviruses, retroviruses, lentivirus-based vectors, as well as other traditional expression vectors. Any vector that has an adequate siRNA expression and procession module may be used. Furthermore, certain chemical modifications to siRNAs, including but not limited to conjugations to other molecules, may be used to facilitate delivery. For certain applications it may be preferable to deliver molecules without transfection by simply formulating in a physiological acceptable solution.

[0313] This embodiment may be used in connection with any of the aforementioned embodiments. Accordingly, the sequences within any pool may be selected by rational design.

Multigene Silencing

[0314] In addition to developing kits that contain multiple siRNA directed against a single gene, another embodiment includes the use of multiple siRNA targeting multiple genes. Multiple genes may be targeted through the use of high- or hyper-functional siRNA. High- or hyper-functional siRNA that exhibit increased potency, require lower concentrations to induce desired phenotypic (and thus therapeutic) effects. This circumvents RISC saturation. It therefore reasons that if lower concentrations of a single siRNA are needed for knockout or knockdown expression of one gene, then the remaining (uncomplexed) RISC will be free and available to interact with siRNA directed against two, three, four, or more, genes. Thus in this embodiment, the authors describe the use of highly functional or hyper-functional siRNA to knock out three separate genes. More preferably, such reagents could be combined to knockout four distinct genes. Even more preferably, highly functional or hyperfunctional siRNA could be used to knock out five distinct genes. Most preferably, siRNA of this type could be used to knockout or knockdown the expression of six or more genes.

Hyperfunctional siRNA

[0315] The term hyperfunctional siRNA (hf-siRNA) describes a subset of the siRNA population that induces RNAi in cells at low- or sub-nanomolar concentrations for extended periods of time. These traits, heightened potency and extended longevity of the RNAi phenotype, are highly attractive from a therapeutic standpoint. Agents having higher potency require lesser amounts of the molecule to achieve the desired physiological response, thus reducing the probability of side effects due to “off-target” interference. In addition to the potential therapeutic benefits associated with hyperfunctional siRNA, hf-siRNA are also desirable from an economic perspective. Hyperfunctional siRNA may cost less on a per-treatment basis, thus reducing overall expenditures to both the manufacturer and the consumer.

[0316] Identification of hyperfunctional siRNA involves multiple steps that are designed to examine an individual siRNA agent's concentration- and/or longevity-profiles. In one non-limiting example, a population of siRNA directed against a single gene are first analyzed using the previously described algorithm (Formula VIII). Individual siRNA are then introduced into a test cell line and assessed for the ability to degrade the target mRNA. It is important to note that when performing this step it is not necessary to test all of the siRNA. Instead, it is sufficient to test only those siRNA having the highest SMARTSCORES™, or siRNA ranking (i.e., SMARTSCORES™, or siRNA ranking >−10). Subsequently, the gene silencing data is plotted against the SMARTSCORES™, or siRNA rankings (see FIG. 9). siRNA that (1) induce a high degree of gene silencing (i.e., they induce greater than 80% gene knockdown) and (2) have superior SMARTSCORES™ (i.e., a SMARTSCORE™, or siRNA ranking, of >−10, suggesting a desirable average internal stability profile) are selected for further investigations designed to better understand the molecule's potency and longevity. In one, non-limiting study dedicated to understanding a molecule's potency, an siRNA is introduced into one (or more) cell types in increasingly diminishing concentrations (e.g., 3.0→0.3 nM). Subsequently, the level of gene silencing induced by each concentration is examined and siRNA that exhibit hyperfunctional potency (i.e., those that induce 80% silencing or greater at, e.g., picomolar concentrations) are identified. In a second study, the longevity profiles of siRNA having high (>−10) SMARTSCORES™, or siRNA rankings and greater than 80% silencing are examined. In one non-limiting example of how this is achieved, siRNA are introduced into a test cell line and the levels of RNAi are measured over an extended period of time (e.g., 24-168 hrs). siRNAs that exhibit strong RNA interference patterns (i.e., >80% interference) for periods of time greater than, e.g., 120 hours, are thus identified. Studies similar to those described above can be performed on any and all of the >10⁶ siRNA included in this document to further define the most functional molecule for any given gene. Molecules possessing one or both properties (extended longevity and heightened potency) are labeled “hyperfunctional siRNA,” and earmarked as candidates for future therapeutic studies.

[0317] While the example(s) given above describe one means by which hyperfunctional siRNA can be isolated, neither the assays themselves nor the selection parameters used are rigid and can vary with each family of siRNA. Families of siRNA include siRNAs directed against a single gene, or directed against a related family of genes.

[0318] The highest quality siRNA achievable for any given gene may vary considerably. Thus, for example, in the case of one gene (gene X), rigorous studies such as those described above may enable the identification of an siRNA that, at picomolar concentrations, induces 99⁺% silencing for a period of 10 days. Yet identical studies of a second gene (gene Y) may yield an siRNA that at high nanomolar concentrations (e.g., 100 nM) induces only 75% silencing for a period of 2 days. Both molecules represent the very optimum siRNA for their respective gene targets and therefore are designated “hyperfunctional.” Yet due to a variety of factors including but not limited to target concentration, siRNA stability, cell type, off-target interference, and others, equivalent levels of potency and longevity are not achievable. Thus, for these reasons, the parameters described in the before mentioned assays can vary. While the initial screen selected siRNA that had SMARTSCORES™ above −10 and a gene silencing capability of greater than 80%, selections that have stronger (or weaker) parameters can be implemented. Similarly, in the subsequent studies designed to identify molecules with high potency and longevity, the desired cutoff criteria (i.e., the lowest concentration that induces a desirable level of interference, or the longest period of time that interference can be observed) can vary. The experimentation subsequent to application of the rational criteria of this application is significantly reduced where one is trying to obtain a suitable hyperfunctional siRNA for, for example, therapeutic use. When, for example, the additional experimentation of the type described herein is applied by one skilled in the art with this disclosure in hand, a hyperfunctional siRNA is readily identified.

[0319] The siRNA may be introduced into a cell by any method that is now known or that comes to be known and that from reading this disclosure, persons skilled in the art would determine would be useful in connection with the present invention in enabling siRNA to cross the cellular membrane. These methods include, but are not limited to, any manner of transfection, such as, for example, transfection employing DEAE-Dextran, calcium phosphate, cationic lipids/liposomes, micelles, manipulation of pressure, microinjection, electroporation, immunoporation, use of vectors such as viruses, plasmids, cosmids, bacteriophages, cell fusions, and coupling of the polynucleotides to specific conjugates or ligands such as antibodies, antigens, or receptors, passive introduction, adding moieties to the siRNA that facilitate its uptake, and the like.

[0320] Having described the invention with a degree of particularity, examples will now be provided. These examples are not intended to and should not be construed to limit the scope of the claims in any way.

### EXAMPLES

### General Techniques and Nomenclatures

[0321] siRNA nomenclature. All siRNA duplexes are referred to by sense strand. The first nucleotide of the 5′-end of the sense strand is position 1, which corresponds to position 19 of the antisense strand for a 19-mer. In most cases, to compare results from different experiments, silencing was determined by measuring specific transcript mRNA levels or enzymatic activity associated with specific transcript levels, 24 hours post-transfection, with siRNA concentrations held constant at 100 nM. For all experiments, unless otherwise specified, transfection efficiency was ensured to be over 95%, and no detectable cellular toxicity was observed. The following system of nomenclature was used to compare and report siRNA-silencing functionality: “F” followed by the degree of minimal knockdown. For example, F50 signifies at least 50% knockdown, F80 means at least 80%, and so forth. For this study, all sub-F50 siRNAs were considered non-functional.

[0322] Cell culture and transfection. 96-well plates are coated with 50 μl of 50 mg/ml poly-L-lysine (Sigma) for 1 hr, and then washed 3× with distilled water before being dried for 20 min. HEK293 cells or HEK293Lucs or any other cell type of interest are released from their solid support by trypsinization, diluted to 3.5×10⁵ cells/ml, followed by the addition of 100 μL of cells/well. Plates are then incubated overnight at 37° C., 5% CO₂. Transfection procedures can vary widely depending on the cell type and transfection reagents. In one non-limiting example, a transfection mixture consisting of 2 mL Opti-MEM I (Gibco-BRL), 80 μl Lipofectamine 2000 (Invitrogen), 15 μL SUPERNasin at 20 U/R1 (Ambion), and 1.5 μl of reporter gene plasmid at 1 μg/μl is prepared in 5-ml polystyrene round bottom tubes. One hundred μl of transfection reagent is then combined with 100 μl of siRNAs in polystyrene deep-well titer plates (Beckman) and incubated for 20 to 30 min at room temperature. Five hundred and fifty microliters of Opti-MEM is then added to each well to bring the final siRNA concentration to 100 nM. Plates are then sealed with parafilm and mixed. Media is removed from HEK293 cells and replaced with 95 μl of transfection mixture. Cells are incubated overnight at 37° C., 5% CO₂.

[0323] Quantification of gene knockdown. A variety of quantification procedures can be used to measure the level of silencing induced by siRNA or siRNA pools. In one non-limiting example: to measure mRNA levels 24 hrs post-transfection, QuantiGene branched-DNA (bDNA) kits (Bayer) (Wang, et al, Regulation of insulin preRNA splicing by glucose. Proc. Natl. Acad. Sci. USA 1997, 94:4360.) are used according to manufacturer instructions. To measure luciferase activity, media is removed from HEK293 cells 24 hrs post-transfection, and 50 μl of Steady-GLO reagent (Promega) is added. After 5 minutes, plates are analyzed on a plate reader.

### Example I

### Sequences Used to Develop the Algorithm

[0324] Anti-Firefly and anti-Cyclophilin siRNAs panels (FIG. 5a, b) sorted according to using Formula VIII predicted values. All siRNAs scoring more than 0 (formula VIII) and more then 20 (formula IX) are fully functional. All ninety sequences for each gene (and DBI) appear below in Table III.

TABLE III

| | | | |
|---|---|---|---|
| Cyclo | 1 | SEQ. ID 0032 | GUUCCAAAAACAGUGGAUA |
| Cyclo | 2 | SEQ. ID 0033 | UCCAAAAACAGUGGAUAAU |
| Cyclo | 3 | SEQ. ID 0034 | CAAAAACAGUGGAUAAUUU |
| Cyclo | 4 | SEQ. ID 0035 | AAAACAGUGGAUAAUUUUG |
| Cyclo | 5 | SEQ. ID 0036 | AACAGUGGAUAAUUUUGUG |
| Cyclo | 6 | SEQ. ID 0037 | CAGUGGAUAAUUUUGUGGC |
| Cyclo | 7 | SEQ. ID 0038 | GUGGAUAAUUUUGUGGCCU |
| Cyclo | 8 | SEQ. ID 0039 | GGAUAAUUUUGUGGCCUUA |
| Cyclo | 9 | SEQ. ID 0040 | AUAAUUUUGUGGCCUUAGC |
| Cyclo | 10 | SEQ. ID 0041 | AAUUUUGUGGCCUUAGCUA |
| Cyclo | 11 | SEQ. ID 0042 | UUUUGUGGCCUUAGCUACA |
| Cyclo | 12 | SEQ. ID 0043 | UUGUGGCCUUAGCUACAGG |
| Cyclo | 13 | SEQ. ID 0044 | GUGGCCUUAGCUACAGGAG |
| Cyclo | 14 | SEQ. ID 0045 | GGCCUUAGCUACAGGAGAG |
| Cyclo | 15 | SEQ. ID 0046 | CCUUAGCUACAGGAGAGAA |
| Cyclo | 16 | SEQ. ID 0047 | UUAGCUACAGGAGAGAAAG |
| Cyclo | 17 | SEQ. ID 0048 | AGCUACAGGAGAGAAAGGA |
| Cyclo | 18 | SEQ. ID 0049 | CUACAGGAGAGAAAGGAUU |
| Cyclo | 19 | SEQ. ID 0050 | ACAGGAGAGAAAGGAUUUG |
| Cyclo | 20 | SEQ. ID 0051 | AGGAGAGAAAGGAUUUGGC |
| Cyclo | 21 | SEQ. ID 0052 | GAGAGAAAGGAUUUGGCUA |
| Cyclo | 22 | SEQ. ID 0053 | GAGAAAGGAUUUGGCUACA |
| Cyclo | 23 | SEQ. ID 0054 | GAAAGGAUUUGGCUACAAA |
| Cyclo | 24 | SEQ. ID 0055 | AAGGAUUUGGCUACAAAAA |
| Cyclo | 25 | SEQ. ID 0056 | GGAUUUGGCUACAAAAACA |
| Cyclo | 26 | SEQ. ID 0057 | AUUUGGCUACAAAAACAGC |
| Cyclo | 27 | SEQ. ID 0058 | UUGGCUACAAAAACAGCAA |
| Cyclo | 28 | SEQ. ID 0059 | GGCUACAAAAACAGCAAAU |
| Cyclo | 29 | SEQ. ID 0060 | CUACAAAAACAGCAAAUUC |
| Cyclo | 30 | SEQ. ID 0061 | ACAAAAACAGCAAAUUCCA |
| Cyclo | 31 | SEQ. ID 0062 | AAAAACAGCAAAUUCCAUC |
| Cyclo | 32 | SEQ. ID 0063 | AAACAGCAAAUUCCAUCGU |
| Cyclo | 33 | SEQ. ID 0064 | ACAGCAAAUUCCAUCGUGU |
| Cyclo | 34 | SEQ. ID 0065 | AGCAAAUUCCAUCGUGUAA |
| Cyclo | 35 | SEQ. ID 0066 | CAAAUUCCAUCGUGUAAUC |
| Cyclo | 36 | SEQ. ID 0067 | AAUUCCAUCGUGUAAUCAA |
| Cyclo | 37 | SEQ. ID 0068 | UUCCAUCGUGUAAUCAAGG |
| Cyclo | 38 | SEQ. ID 0069 | CCAUCGUGUAAUCAAGGAC |
| Cyclo | 39 | SEQ. ID 0070 | AUCGUGUAAUCAAGGACUU |
| Cyclo | 40 | SEQ. ID 0071 | CGUGUAAUCAAGGACUUCA |
| Cyclo | 41 | SEQ. ID 0072 | UGUAAUCAAGGACUUCAUG |
| Cyclo | 42 | SEQ. ID 0073 | UAAUCAAGGACUUCAUGAU |
| Cyclo | 43 | SEQ. ID 0074 | AUCAAGGACUUCAUGAUCC |
| Cyclo | 44 | SEQ. ID 0075 | CAAGGACUUCAUGAUCCAG |
| Cyclo | 45 | SEQ. ID 0076 | AGGACUUCAUGAUCCAGGG |
| Cyclo | 46 | SEQ. ID 0077 | GACUUCAUGAUCCAGGGCG |
| Cyclo | 47 | SEQ. ID 0078 | CUUCAUGAUCCAGGGCGGA |
| Cyclo | 48 | SEQ. ID 0079 | UCAUGAUCCAGGGCGGAGA |
| Cyclo | 49 | SEQ. ID 0080 | AUGAUCCAGGGCGGAGACU |
| Cyclo | 50 | SEQ. ID 0081 | GAUCCAGGGCGGAGACUUC |
| Cyclo | 51 | SEQ. ID 0082 | UCCAGGGCGGAGACUUCAC |
| Cyclo | 52 | SEQ. ID 0083 | CAGGGCGGAGACUUCACCA |
| Cyclo | 53 | SEQ. ID 0084 | GGGCGGAGACUUCACCAGG |
| Cyclo | 54 | SEQ. ID 0085 | GCGGAGACUUCACCAGGGG |
| Cyclo | 55 | SEQ. ID 0086 | GGAGACUUCACCAGGGGAG |
| Cyclo | 56 | SEQ. ID 0087 | AGACUUCACCAGGGGAGAU |
| Cyclo | 57 | SEQ. ID 0088 | ACUUCACCAGGGGAGAUGG |
| Cyclo | 58 | SEQ. ID 0089 | UUCACCAGGGGAGAUGGCA |
| Cyclo | 59 | SEQ. ID 0090 | CACCAGGGGAGAUGGCACA |
| Cyclo | 60 | SEQ. ID 0091 | CCAGGGGAGAUGGCACAGG |
| Cyclo | 61 | SEQ. ID 0092 | AGGGGAGAUGGCACAGGAG |
| Cyclo | 62 | SEQ. ID 0093 | GGGAGAUGGCACAGGAGGA |
| Cyclo | 63 | SEQ. ID 0094 | GAGAUGGCACAGGAGGAAA |
| Cyclo | 64 | SEQ. ID 0095 | GAUGGCACAGGAGGAAAGA |
| Cyclo | 65 | SEQ. ID 0096 | UGGCACAGGAGGAAAGAGC |
| Cyclo | 66 | SEQ. ID 0097 | GCACAGGAGGAAAGAGCAU |
| Cyclo | 67 | SEQ. ID 0098 | ACAGGAGGAAAGAGCAUCU |
| Cyclo | 68 | SEQ. ID 0099 | AGGAGGAAAGAGCAUCUAC |
| Cyclo | 69 | SEQ. ID 0100 | GAGGAAAGAGCAUCUACGG |
| Cyclo | 70 | SEQ. ID 0101 | GGAAAGAGCAUCUACGGUG |
| Cyclo | 71 | SEQ. ID 0102 | AAAGAGCAUCUACGGUGAG |
| Cyclo | 72 | SEQ. ID 0103 | AGAGCAUCUACGGUGAGCG |
| Cyclo | 73 | SEQ. ID 0104 | AGCAUCUACGGUGAGCGCU |
| Cyclo | 74 | SEQ. ID 0105 | CAUCUACGGUGAGCGCUUC |
| Cyclo | 75 | SEQ. ID 0106 | UCUACGGUGAGCGCUUCCC |
| Cyclo | 76 | SEQ. ID 0107 | UACGGUGAGCGCUUCCCCG |
| Cyclo | 77 | SEQ. ID 0108 | CGGUGAGCGCUUCCCCGAU |
| Cyclo | 78 | SEQ. ID 0109 | GUGAGCGCUUCCCCGAUGA |
| Cyclo | 79 | SEQ. ID 0110 | GAGCGCUUCCCCGAUGAGA |
| Cyclo | 80 | SEQ. ID 0111 | GCGCUUCCCCGAUGAGAAC |
| Cyclo | 81 | SEQ. ID 0112 | GCUUCCCCGAUGAGAACUU |
| Cyclo | 82 | SEQ. ID 0113 | UUCCCCGAUGAGAACUUCA |
| Cyclo | 83 | SEQ. ID 0114 | CCCCGAUGAGAACUUCAAA |
| Cyclo | 84 | SEQ. ID 0115 | CCGAUGAGAACUUCAAACU |
| Cyclo | 85 | SEQ. ID 0116 | GAUGAGAACUUCAAACUGA |
| Cyclo | 86 | SEQ. ID 0117 | UGAGAACUUCAAACUGAAG |
| Cyclo | 87 | SEQ. ID 0118 | AGAACUUCAAACUGAAGCA |
| Cyclo | 88 | SEQ. ID 0119 | AACUUCAAACUGAAGCACU |
| Cyclo | 89 | SEQ. ID 0120 | CUUCAAACUGAAGCACUAC |
| Cyclo | 90 | SEQ. ID 0121 | UCAAACUGAAGCACUACGG |
| DB | 1 | SEQ. ID 0122 | ACGGGCAAGGCCAAGUGGG |
| DB | 2 | SEQ. ID 0123 | CGGGCAAGGCCAAGUGGGA |
| DB | 3 | SEQ. ID 0124 | GGGCAAGGCCAAGUGGGAU |
| DB | 4 | SEQ. ID 0125 | GGCAAGGCCAAGUGGGAUG |
| DB | 5 | SEQ. ID 0126 | GCAAGGCCAAGUGGGAUGC |
| DB | 6 | SEQ. ID 0127 | CAAGGCCAAGUGGGAUGCC |
| DB | 7 | SEQ. ID 0128 | AAGGCCAAGUGGGAUGCCU |
| DB | 8 | SEQ. ID 0129 | AGGCCAAGUGGGAUGCCUG |
| DB | 9 | SEQ. ID 0130 | GGCCAAGUGGGAUGCCUGG |
| DB | 10 | SEQ. ID 0131 | GCCAAGUGGGAUGCCUGGA |
| DB | 11 | SEQ. ID 0132 | CCAAGUGGGAUGCCUGGAA |
| DB | 12 | SEQ. ID 0133 | CAAGUGGGAUGCCUGGAAU |
| DB | 13 | SEQ. ID 0134 | AAGUGGGAUGCCUGGAAUG |
| DB | 14 | SEQ. ID 0135 | AGUGGGAUGCCUGGAAUGA |
| DB | 15 | SEQ. ID 0136 | GUGGGAUGCCUGGAAUGAG |
| DB | 16 | SEQ. ID 0137 | UGGGAUGCCUGGAAUGAGC |
| DB | 17 | SEQ. ID 0138 | GGGAUGCCUGGAAUGAGCU |
| DB | 18 | SEQ. ID 0139 | GGAUGCCUGGAAUGAGCUG |
| DB | 19 | SEQ. ID 0140 | GAUGCCUGGAAUGAGCUGA |
| DB | 20 | SEQ. ID 0141 | AUGCCUGGAAUGAGCUGAA |
| DB | 21 | SEQ. ID 0142 | UGCCUGGAAUGAGCUGAAA |
| DB | 22 | SEQ. ID 0143 | GCCUGGAAUGAGCUGAAAG |
| DB | 23 | SEQ. ID 0144 | CCUGGAAUGAGCUGAAAGG |
| DB | 24 | SEQ. ID 0145 | CUGGAAUGAGCUGAAAGGG |
| DB | 25 | SEQ. ID 0146 | UGGAAUGAGCUGAAAGGGA |
| DB | 26 | SEQ. ID 0147 | GGAAUGAGCUGAAAGGGAC |
| DB | 27 | SEQ. ID 0148 | GAAUGAGCUGAAAGGGACU |
| DB | 28 | SEQ. ID 0149 | AAUGAGCUGAAAGGGACUU |
| DB | 29 | SEQ. ID 0150 | AUGAGCUGAAAGGGACUUC |
| DB | 30 | SEQ. ID 0151 | UGAGCUGAAAGGGACUUCC |
| DB | 31 | SEQ. ID 0152 | GAGCUGAAAGGGACUUCCA |
| DB | 32 | SEQ. ID 0153 | AGCUGAAAGGGACUUCCAA |
| DB | 33 | SEQ. ID 0154 | GCUGAAAGGGACUUCCAAG |
| DB | 34 | SEQ. ID 0155 | CUGAAAGGGACUUCCAAGG |
| DB | 35 | SEQ. ID 0156 | UGAAAGGGACUUCCAAGGA |
| DB | 36 | SEQ. ID 0157 | GAAAGGGACUUCCAAGGAA |
| DB | 37 | SEQ. ID 0158 | AAAGGGACUUCCAAGGAAG |
| DB | 38 | SEQ. ID 0159 | AAGGGACUUCCAAGGAAGA |
| DB | 39 | SEQ. ID 0160 | AGGGACUUCCAAGGAAGAU |
| DB | 40 | SEQ. ID 0161 | GGGACUUCCAAGGAAGAUG |
| DB | 41 | SEQ. ID 0162 | GGACUUCCAAGGAAGAUGC |
| DB | 42 | SEQ. ID 0163 | GACUUCCAAGGAAGAUGCC |
| DB | 43 | SEQ. ID 0164 | ACUUCCAAGGAAGAUGCCA |
| DB | 44 | SEQ. ID 0165 | CUUCCAAGGAAGAUGCCAU |
| DB | 45 | SEQ. ID 0166 | UUCCAAGGAAGAUGCCAUG |
| DB | 46 | SEQ. ID 0167 | UCCAAGGAAGAUGCCAUGA |
| DB | 47 | SEQ. ID 0168 | CCAAGGAAGAUGCCAUGAA |
| DB | 48 | SEQ. ID 0169 | CAAGGAAGAUGCCAUGAAA |
| DB | 49 | SEQ. ID 0170 | AAGGAAGAUGCCAUGAAAG |
| DB | 50 | SEQ. ID 0171 | AGGAAGAUGCCAUGAAAGC |
| DB | 51 | SEQ. ID 0172 | CGAAGAUGCCAUGAAAGCU |
| DB | 52 | SEQ. ID 0173 | GAAGAUGCCAUGAAAGCUU |
| DB | 53 | SEQ. ID 0174 | AAGAUGCCAUGAAAGCUUA |
| DB | 54 | SEQ. ID 0175 | AGAUGCCAUGAAAGCUUAC |
| DB | 55 | SEQ. ID 0176 | GAUGCCAUGAAAGCUUACA |
| DB | 56 | SEQ. ID 0177 | AUGCCAUGAAAGCUUACAU |
| DB | 57 | SEQ. ID 0178 | UGCCAUGAAAGCUUACAUC |
| DB | 58 | SEQ. ID 0179 | GCCAUGAAAGCUUACAUCA |
| DB | 59 | SEQ. ID 0180 | CCAUGAAAGCUUACAUCAA |
| DB | 60 | SEQ. ID 0181 | CAUGAAAGCUUACAUCAAC |
| DB | 61 | SEQ. ID 0182 | AUGAAAGCUUACAUCAACA |
| DB | 62 | SEQ. ID 0183 | UGAAAGCUUACAUCAACAA |
| DB | 63 | SEQ. ID 0184 | GAAAGCUUACAUCAACAAA |
| DB | 64 | SEQ. ID 0185 | AAAGCUUACAUCAACAAAG |
| DB | 65 | SEQ. ID 0186 | AAGCUUACAUCAACAAAGU |
| DB | 66 | SEQ. ID 0187 | AGCUUACAUCAACAAAGUA |
| DB | 67 | SEQ. ID 0188 | GCUUACAUCAACAAAGUAG |
| DB | 68 | SEQ. ID 0189 | CUUACAUCAACAAAGUAGA |
| DB | 69 | SEQ. ID 0190 | UUACAUCAACAAAGUAGAA |
| DB | 70 | SEQ. ID 0191 | UACAUCAACAAAGUAGAAG |
| DB | 71 | SEQ. ID 0192 | ACAUCAACAAAGUAGAAGA |
| DB | 72 | SEQ. ID 0193 | CAUCAACAAAGUAGAAGAG |
| DB | 73 | SEQ. ID 0194 | AUCAACAAAGUAGAAGAGC |
| DB | 74 | SEQ. ID 0195 | UCAACAAAGUAGAAGAGCU |
| DB | 75 | SEQ. ID 0196 | CAACAAAGUAGAAGAGCUA |
| DB | 76 | SEQ. ID 0197 | AACAAAGUAGAAGAGCUAA |
| DB | 77 | SEQ. ID 0198 | ACAAAGUAGAAGAGCUAAA |
| DB | 78 | SEQ. ID 0199 | CAAAGUAGAAGAGCUAAAG |
| DB | 79 | SEQ. ID 0200 | AAAGUAGAAGAGCUAAAGA |
| DB | 80 | SEQ. ID 0201 | AAGUAGAAGAGCUAAAGAA |
| DB | 81 | SEQ. ID 0202 | AGUAGAAGAGCUAAAGAAA |
| DB | 82 | SEQ. ID 0203 | GUAGAAGAGCUAAAGAAAA |
| DB | 83 | SEQ. ID 0204 | UAGAAGAGCUAAAGAAAAA |
| DB | 84 | SEQ. ID 0205 | AGAAGAGCUAAAGAAAAAA |
| DB | 85 | SEQ. ID 0206 | GAAGAGCUAAAGAAAAAAU |
| DB | 86 | SEQ. ID 0207 | AAGAGCUAAAGAAAAAAUA |
| DB | 87 | SEQ. ID 0208 | AGAGCUAAAGAAAAAAUAC |
| DB | 88 | SEQ. ID 0209 | GAGCUAAAGAAAAAAUACG |
| DB | 89 | SEQ. ID 0210 | AGCUAAAGAAAAAAUACGG |
| DB | 90 | SEQ. ID 0211 | GCUAAAGAAAAAAUACGGG |
| Luc | 1 | SEQ. ID 0212 | AUCCUCAUAAAGGCCAAGA |
| Luc | 2 | SEQ. ID 0213 | AGAUCCUCAUAAAGGCCAA |
| Luc | 3 | SEQ. ID 0214 | AGAGAUCCUCAUAAAGGCC |
| Luc | 4 | SEQ. ID 0215 | AGAGAGAUCCUCAUAAAGG |
| Luc | 5 | SEQ. ID 0216 | UCAGAGAGAUCCUCAUAAA |
| Luc | 6 | SEQ. ID 0217 | AAUCAGAGAGAUCCUCAUA |
| Luc | 7 | SEQ. ID 0218 | AAAAUCAGAGAGAUCCUCA |
| Luc | 8 | SEQ. ID 0219 | GAAAAAUCAGAGAGAUCCU |
| Luc | 9 | SEQ. ID 0220 | AAGAAAAAUCAGAGAGAUC |
| Luc | 10 | SEQ. ID 0221 | GCAAGAAAAAUCAGAGAGA |
| Luc | 11 | SEQ. ID 0222 | ACGCAAGAAAAAUCAGAGA |
| Luc | 12 | SEQ. ID 0223 | CGACGCAAGAAAAAUCAGA |
| Luc | 13 | SEQ. ID 0224 | CUCGACGCAAGAAAAAUCA |
| Luc | 14 | SEQ. ID 0225 | AACUCGACGCAAGAAAAAU |
| Luc | 15 | SEQ. ID 0226 | AAAACUCGACGCAAGAAAA |
| Luc | 16 | SEQ. ID 0227 | GGAAAACUCGACGCAAGAA |
| Luc | 17 | SEQ. ID 0228 | CCGGAAAACUCGACGCAAG |
| Luc | 18 | SEQ. ID 0229 | UACCGGAAAACUCGACGCA |
| Luc | 19 | SEQ. ID 0230 | CUUACCGGAAAACUCGACG |
| Luc | 20 | SEQ. ID 0231 | GUCUUACCGGAAAACUCGA |
| Luc | 21 | SEQ. ID 0232 | AGGUCUUACCGGAAAACUC |
| Luc | 22 | SEQ. ID 0233 | AAAGGUCUUACCGGAAAAC |
| Luc | 23 | SEQ. ID 0234 | CGAAAGGUCUUACCGGAAA |
| Luc | 24 | SEQ. ID 0235 | ACCGAAAGGUCUUACCGGA |
| Luc | 25 | SEQ. ID 0236 | GUACCGAAAGGUCUUACCG |
| Luc | 26 | SEQ. ID 0237 | AAGUACCGAAAGGUCUUAC |
| Luc | 27 | SEQ. ID 0238 | CGAAGUACCGAAAGGUCUU |
| Luc | 28 | SEQ. ID 0239 | GACGAAGUACCGAAAGGUC |
| Luc | 29 | SEQ. ID 0240 | UGGACGAAGUACCGAAAGG |
| Luc | 30 | SEQ. ID 0241 | UGUGGACGAAGUACCGAAA |
| Luc | 31 | SEQ. ID 0242 | UUUGUGGACGAAGUACCGA |
| Luc | 32 | SEQ. ID 0243 | UGUUUGUGGACGAAGUACC |
| Luc | 33 | SEQ. ID 0244 | UGUGUUUGUGGACGAAGUA |
| Luc | 34 | SEQ. ID 0245 | GUUGUGUUUGUGGACGAAG |
| Luc | 35 | SEQ. ID 0246 | GAGUUGUGUUUGUGGACGA |
| Luc | 36 | SEQ. ID 0247 | AGGAGUUGUGUUUGUGGAC |
| Luc | 37 | SEQ. ID 0248 | GGAGGAGUUGUGUUUGUGG |
| Luc | 38 | SEQ. ID 0249 | GCGGAGGAGUUGUGUUUGU |
| Luc | 39 | SEQ. ID 0250 | GCGCGGAGGAGUUGUGUUU |
| Luc | 40 | SEQ. ID 0251 | UUGCGCGGAGGAGUUGUGU |
| Luc | 41 | SEQ. ID 0252 | AGUUGCGCGGAGGAGUUGU |
| Luc | 42 | SEQ. ID 0253 | AAAGUUGCGCGGAGGAGUU |
| Luc | 43 | SEQ. ID 0254 | AAAAAGUUGCGCGGAGGAG |
| Luc | 44 | SEQ. ID 0255 | CGAAAAAGUUGCGCGGAGG |
| Luc | 45 | SEQ. ID 0256 | CGCGAAAAAGUUGCGCGGA |
| Luc | 46 | SEQ. ID 0257 | ACCGCGAAAAAGUUGCGCG |
| Luc | 47 | SEQ. ID 0258 | CAACCGCGAAAAAGUUGCG |
| Luc | 48 | SEQ. ID 0259 | AACAACCGCGAAAAAGUUG |
| Luc | 49 | SEQ. ID 0260 | GUAACAACCGCGAAAAAGU |
| Luc | 50 | SEQ. ID 0261 | AAGUAACAACCGCGAAAAA |
| Luc | 51 | SEQ. ID 0262 | UCAAGUAACAACCGCGAAA |
| Luc | 52 | SEQ. ID 0263 | AGUCAAGUAACAACCGCGA |
| Luc | 53 | SEQ. ID 0264 | CCAGUCAAGUAACAACCGC |
| Luc | 54 | SEQ. ID 0265 | CGCCAGUCAAGUAACAACC |
| Luc | 55 | SEQ. ID 0266 | GUCGCCAGUCAAGUAACAA |
| Luc | 56 | SEQ. ID 0267 | ACGUCGCCAGUCAAGUAAC |
| Luc | 57 | SEQ. ID 0268 | UUACGUCGCCAGUCAAGUA |
| Luc | 58 | SEQ. ID 0269 | GAUUACGUCGCCAGUCAAG |
| Luc | 59 | SEQ. ID 0270 | UGGAUUACGUCGCCAGUCA |
| Luc | 60 | SEQ. ID 0271 | CGUGGAUUACGUCGCCAGU |
| Luc | 61 | SEQ. ID 0272 | AUCGUGGAUUACGUCGCCA |
| Luc | 62 | SEQ. ID 0273 | AGAUCGUGGAUUACGUCGC |
| Luc | 63 | SEQ. ID 0274 | AGAGAUCGUGGAUUACGUC |
| Luc | 64 | SEQ. ID 0275 | AAAGAGAUCGUGGAUUACG |
| Luc | 65 | SEQ. ID 0276 | AAAAAGAGAUCGUGGAUUA |
| Luc | 66 | SEQ. ID 0277 | GGAAAAAGAGAUCGUGGAU |
| Luc | 67 | SEQ. ID 0278 | ACGGAAAAAGAGAUCGUGG |
| Luc | 68 | SEQ. ID 0279 | UGACGGAAAAAGAGAUCGU |
| Luc | 69 | SEQ. ID 0280 | GAUGACGGAAAAAGAGAUC |
| Luc | 70 | SEQ. ID 0281 | ACGAUGACGGAAAAAGAGA |
| Luc | 71 | SEQ. ID 0282 | AGACGAUGACGGAAAAAGA |
| Luc | 72 | SEQ. ID 0283 | AAAGACGAUGACGGAAAAA |
| Luc | 73 | SEQ. ID 0284 | GGAAAGACGAUGACGGAAA |
| Luc | 74 | SEQ. ID 0285 | ACGGAAAGACGAUGACGGA |
| Luc | 75 | SEQ. ID 0286 | GCACGGAAAGACGAUGACG |
| Luc | 76 | SEQ. ID 0287 | GAGCACGGAAAGACGAUGA |
| Luc | 77 | SEQ. ID 0288 | UGGAGCACGGAAAGACGAU |
| Luc | 78 | SEQ. ID 0289 | UUUGGAGCACGGAAAGACG |
| Luc | 79 | SEQ. ID 0290 | GUUUUGGAGCACGGAAAGA |
| Luc | 80 | SEQ. ID 0291 | UUGUUUUGGAGCACGGAAA |
| Luc | 81 | SEQ. ID 0292 | UGUUGUUUUGGAGCACGGA |
| Luc | 82 | SEQ. ID 0293 | GUUGUUGUUUUGGAGCACG |
| Luc | 83 | SEQ. ID 0294 | CCGUUGUUGUUUUGGAGCA |
| Luc | 84 | SEQ. ID 0295 | CGCCGUUGUUGUUUUGGAG |
| Luc | 85 | SEQ. ID 0296 | GCCGCCGUUGUUGUUUUGG |
| Luc | 86 | SEQ. ID 0297 | CCGCCGCCGUUGUUGUUUU |
| Luc | 87 | SEQ. ID 0298 | UCCCGCCGCCGUUGUUGUU |
| Luc | 88 | SEQ. ID 0299 | CUUCCCGCCGCCGUUGUUG |
| Luc | 89 | SEQ. ID 0300 | AACUUCCCGCCGCCGUUGU |
| Luc | 90 | SEQ. ID 0301 | UGAACUUCCCGCCGCCGUU |

### Example II

### Validation of the Algorithm Using DBI, Luciferase, PLK, EGFR, and SEAP

[0325] The algorithm (Formula VIII) identified siRNAs for five genes, human DBI, firefly luciferase (fLuc), renilla luciferase (rLuc), human PLK, and human secreted alkaline phosphatase (SEAP). Four individual siRNAs were selected on the basis of their SMARTSCORES™ derived by analysis of their sequence using Formula VIII (all of the siRNAs would be selected with Formula IX as well) and analyzed for their ability to silence their targets' expression. In addition to the scoring, a BLAST search was conducted for each siRNA. To minimize the potential for off-target silencing effects, only those target sequences with more than three mismatches against un-related sequences were selected. Semizarov, et al. (2003)

[0326] Specificity of short interfering RNA determined through gene expression signatures, Proc. Natl. Acad. Sci. USA, 100:6347. These duplexes were analyzed individually and in pools of 4 and compared with several siRNAs that were randomly selected. The functionality was measured as a percentage of targeted gene knockdown as compared to controls. All siRNAs were transfected as described by the methods above at 100 nM concentration into HEK293 using Lipofectamine 2000. The level of the targeted gene expression was evaluated by B-DNA as described above and normalized to the non-specific control. FIG. 10 shows that the siRNAs selected by the algorithm disclosed herein were significantly more potent than randomly selected siRNAs. The algorithm increased the chances of identifying an F50 siRNA from 48% to 91%, and an F80 siRNA from 13% to 57%. In addition, pools of SMART siRNA silence the selected target better than randomly selected pools (see FIG. 10F).

### Example III

### Validation of the Algorithm Using Genes Involved in Clathrin-Dependent Endocytosis

[0327] Components of clathrin-mediated endocytosis pathway are key to modulating intracellular signaling and play important roles in disease. Chromosomal rearrangements that result in fusion transcripts between the Mixed-Lineage Leukemia gene (MLL) and CALM (clathrin assembly lymphoid myeloid leukemia gene) are believed to play a role in leukemogenesis. Similarly, disruptions in Rab7 and Rab9, as well as HIP1 (Huntingtin-interacting protein), genes that are believed to be involved in endocytosis, are potentially responsible for ailments resulting in lipid storage, and neuronal diseases, respectively. For these reasons, siRNA directed against clathrin and other genes involved in the clathrin-mediated endocytotic pathway are potentially important research and therapeutic tools.

[0328] siRNAs directed against genes involved in the clathrin-mediated endocytosis pathways were selected using Formula VIII. The targeted genes were clathrin heavy chain (CHC, accession # NM 004859), clathrin light chain A (CLCa, NM_{—}001833), clathrin light chain B (CLCb, NM_{—}001834), CALM (U45976), β2 subunit of AP-2 (β2, NM_{—}001282), Eps15 (NM_{—}001981), Eps15R(NM_{—}021235), dynamin II (DYNII, NM_{—}004945), Rab5a (BC001267), Rab5b (NM-002868), Rab5c (AF141304), and EEA.1 (XM_{—}018197).

[0329] For each gene, four siRNAs duplexes with the highest scores were selected and a BLAST search was conducted for each of them using the Human EST database. In order to minimize the potential for off-target silencing effects, only those sequences with more than three mismatches against un-related sequences were used. All duplexes were synthesized at Dharmacon, Inc. as 21-mers with 3′-UU overhangs using a modified method of 2′-ACE chemistry, Scaringe (2000) Advanced 5′-silyl-2′-orthoester approach to RNA oligonucleotide synthesis, Methods Enzymol. 317:3, and the antisense strand was chemically phosphorylated to insure maximized activity.

[0330] HeLa cells were grown in Dulbecco's modified Eagle's medium (DMEM) containing 10% fetal bovine serum, antibiotics and glutamine. siRNA duplexes were resuspended in 1× siRNA Universal buffer (Dharmacon, Inc.) to 20CM prior to transfection. HeLa cells in 12-well plates were transfected twice with 4 μl of 20 μM siRNA duplex in 3 μl Lipofectamine 2000 reagent (Invitrogen, Carlsbad, Calif., USA) at 24-hour intervals. For the transfections in which 2 or 3 siRNA duplexes were included, the amount of each duplex was decreased, so that the total amount was the same as in transfections with single siRNAs. Cells were plated into normal culture medium 12 hours prior to experiments, and protein levels were measured 2 or 4 days after the first transfection.

[0331] Equal amounts of lysates were resolved by electrophoresis, blotted, and stained with the antibody specific to targeted protein, as well as antibodies specific to unrelated proteins, PP1 phosphatase and Tsg101 (not shown). The cells were lysed in Triton X-100/glycerol solubilization buffer as described previously. Tebar, Bohlander, & Sorkin (1999) Clathrin Assembly Lymphoid Myeloid Leukemia (CALM) Protein: Localization in Endocytic-coated Pits, Interactions with Clathrin, and the Impact of Overexpression on Clathrin-mediated Traffic, Mol. Biol. Cell, 10:2687. Cell lysates were electrophoresed, transferred to nitrocellulose membranes, and Western blotting was performed with several antibodies followed by detection using enhanced chemiluminescence system (Pierce, Inc). Several x-ray films were analyzed to determine the linear range of the chemiluminescence signals, and the quantifications were performed using densitometry and AlphaImager v5.5 software (Alpha Innotech Corporation). In experiments with Eps15R-targeted siRNAs, cell lysates were subjected to immunoprecipitation with Ab860, and Eps15R was detected in immunoprecipitates by Western blotting as described above.

[0332] The antibodies to assess the levels of each protein by Western blot were obtained from the following sources: monoclonal antibody to clathrin heavy chain (TD. 1) was obtained from American Type Culture Collection (Rockville, Md., USA); polyclonal antibody to dynamin II was obtained from Affinity Bioreagents, Inc. (Golden, Colo., USA); monoclonal antibodies to EEA. 1 and Rab5a were purchased from BD Transduction Laboratories (Los Angeles, Calif., USA); the monoclonal antibody to Tsg101 was purchased from Santa Cruz Biotechnology, Inc. (Santa Cruz, Calif., USA); the monoclonal antibody to GFP was from ZYMED Laboratories Inc. (South San Francisco, Calif., USA); the rabbit polyclonal antibodies Ab32 specific to α-adaptins and Ab20 to CALM were described previously (Sorkin et al. (1995) Stoichiometric Interaction of the Epidermal Growth Factor Receptor with the Clathrin-associated Protein Complex AP-2, J. Biol. Chem., 270:619), the polyclonal antibodies to clathrin light chains A and B were kindly provided by Dr. F. Brodsky (UCSF); monoclonal antibodies to PP1 (BD Transduction Laboratories) and α-Actinin (Chemicon) were kindly provided by Dr. M. Dell'Acqua (University of Colorado); Eps15 Ab577 and Eps15R Ab860 were kindly provided by Dr. P. P. Di Fiore (European Cancer Institute).

[0333] FIG. 11 demonstrates the in vivo functionality of 48 individual siRNAs, selected using Formula VIII (most of them will meet the criteria incorporated by Formula IX as well) targeting 12 genes. Various cell lines were transfected with siRNA duplexes (Dup1-4) or pools of siRNA duplexes (Pool), and the cells were lysed 3 days after transfection with the exception of CALM (2 days) and β2 (4 days).

[0334] Note a β1-adaptin band (part of AP-1 Golgi adaptor complex) that runs slightly slower than β2 adaptin. CALM has two splice variants, 66 and 72 kD. The full-length Eps15R (a doublet of ˜130 kD) and several truncated spliced forms of ˜100 kD and ˜70 kD were detected in Eps15R immunoprecipitates (shown by arrows). The cells were lysed 3 days after transfection. Equal amounts of lysates were resolved by electrophoresis and blotted with the antibody specific to a targeted protein (GFP antibody for YFP fusion proteins) and the antibody specific to unrelated proteins PP1 phosphatase or α-actinin, and TSG1101. The amount of protein in each specific band was normalized to the amount of non-specific proteins in each lane of the gel. Nearly all of them appear to be functional, which establishes that Formula VIII and IX can be used to predict siRNAs' functionality in general in a genome wide manner.

[0335] To generate the fusion of yellow fluorescent protein (YFP) with Rab5b or Rab5c (YFP-Rab5b or YFP-Rab5c), a DNA fragment encoding the full-length human Rab5b or Rab5c was obtained by PCR using Pfu polymerase (Stratagene) with a SacI restriction site introduced into the 5′ end and a KpnI site into the 3′ end and cloned into pEYFP-C1 vector (CLONTECH, Palo Alto, Calif., USA). GFP-CALM and YFP-Rab5a were described previously (Tebar, Bohlander, & Sorkin (1999) Clathrin Assembly Lymphoid Myeloid Leukemia (CALM) Protein: Localization in Endocytic-coated Pits, Interactions with Clathrin, and the Impact of Overexpression on Clathrin-mediated Traffic, Mol. Biol. Cell 10:2687).

### Example IV

### Validation of the Algorithm Using Eg5, GADPH, ATE1, MEK2, MEK1, QB, LaminA/C, C-myc, Human Cyclophilin, and Mouse Cyclophilin

[0336] A number of genes have been identified as playing potentially important roles in disease etiology. Expression profiles of normal and diseased kidneys has implicated Edg5 in immunoglobulin A neuropathy, a common renal glomerular disease. Myc1, MEK1/2 and other related kinases have been associated with one or more cancers, while lamins have been implicated in muscular dystrophy and other diseases. For these reasons, siRNA directed against the genes encoding these classes of molecules would be important research and therapeutic tools.

[0337] FIG. 12 illustrates four siRNAs targeting 10 different genes (Table V for sequence and accession number information) that were selected according to the Formula VIII and assayed as individuals and pools in HEK293 cells. The level of siRNA induced silencing was measured using the B-DNA assay. These studies demonstrated that thirty-six out of the forty individual SMART-selected siRNA tested are functional (90%) and all 10 pools are fully functional.

### Example V

### Validation of the Algorithm Using Bcl2

[0338] Bcl-2 is a ˜25 kD, 205-239 amino acid, anti-apoptotic protein that contains considerable homology with other members of the BCL family including BCLX, MCL1, BAX, BAD, and BIK. The protein exists in at least two forms (Bcl2a, which has a hydrophobic tail for membrane anchorage, and Bcl2b, which lacks the hydrophobic tail) and is predominantly localized to the mitochondrial membrane. While Bcl2 expression is widely distributed, particular interest has focused on the expression of this molecule in B and T cells. Bcl2 expression is down-regulated in normal germinal center B cells yet in a high percentage of follicular lymphomas, Bcl2 expression has been observed to be elevated. Cytological studies have identified a common translocation ((14; 18)(q32; q32)) amongst a high percentage (>70%) of these lymphomas. This genetic lesion places the Bcl2 gene in juxtaposition to immunoglobulin heavy chain gene (IgH) encoding sequences and is believed to enforce inappropriate levels of gene expression, and resistance to programmed cell death in the follicle center B cells. In other cases, hypomethylation of the Bcl2 promoter leads to enhanced expression and again, inhibition of apoptosis. In addition to cancer, dysregulated expression of Bcl-2 has been correlated with multiple sclerosis and various neurological diseases.

[0339] The correlation between Bcl-2 translocation and cancer makes this gene an attractive target for RNAi. Identification of siRNA directed against the bcl2 transcript (or Bcl2-IgH fusions) would further our understanding Bcl2 gene function and possibly provide a future therapeutic agent to battle diseases that result from altered expression or function of this gene.

In Silico Identification of Functional siRNA

[0340] To identify functional and hyperfunctional siRNA against the Bcl2 gene, the sequence for Bcl-2 was downloaded from the NCBI Unigene database and analyzed using the Formula VIII algorithm. As a result of these procedures, both the sequence and SMARTSCORES™, or siRNA rankings of the Bcl2 siRNA were obtained and ranked according to their functionality. Subsequently, these sequences were BLAST'ed (database) to insure that the selected sequences were specific and contained minimal overlap with unrealated genes. The SMARTSCORES™, or siRNA rankings for the top 10 Bcl-2 siRNA are identified in FIG. 13.

In Vivo Testing of Bcl-2 SiRNA

[0341] Bcl-2 siRNAs having the top ten SMARTSCORES™, or siRNA rankings were selected and tested in a functional assay to determine silencing efficiency. To accomplish this, each of the ten duplexes were synthesized using 2′-O-ACE chemistry and transfected at 100 nM concentrations into cells. Twenty-four hours later assays were performed on cell extracts to assess the degree of target silencing. Controls used in these experiments included mock transfected cells, and cells that were transfected with a non-specific siRNA duplex.

[0342] The results of these experiments are presented below (and in FIG. 14) and show that all ten of the selected siRNA induce 80% or better silencing of the Bcl2 message at 100 nM concentrations. These data verify that the algorithm successfully identified functional Bcl2 siRNA and provide a set of functional agents that can be used in experimental and therapeutic environments.

| | | |
|---|---|---|
| siRNA 1 | GGGAGAUAGUGAUGAAGUA | SEQ. ID NO. 302 |
| siRNA 2 | GAAGUACAUCCAUUAUAAG | SEQ. ID NO. 303 |
| siRNA 3 | GUACGACAACCGGGAGAUA | SEQ. ID NO. 304 |
| siRNA 4 | AGAUAGUGAUGAAGUACAU | SEQ. ID NO. 305 |
| siRNA 5 | UGAAGACUCUGCUCAGUUU | SEQ. ID NO. 306 |
| sIRNA 6 | GCAUGCGGCCUCUGUUUGA | SEQ. ID NO. 307 |
| siRNA 7 | UGCGGCCUCUGUUUGAUUU | SEQ. ID NO. 308 |
| siRNA 8 | GAGAUAGUGAUGAAGUACA | SEQ. ID NO. 309 |
| siRNA 9 | GGAGAUAGUGAUGAAGUAC | SEQ. ID NO. 310 |
| siRNA 10 | GAAGACUCUGCUCAGUUUG | SEQ. ID NO. 311 |

[0343] Bcl2 siRNA: Sense Strand, 5′→3′

### Example VI

### Sequences Selected by the Algorithm

[0344] Sequences of the siRNAs selected using Formulas (Algorithms) VIII and IX with their corresponding ranking, which have been evaluated for the silencing activity in vivo in the present study (Formula VIII and IX, respectively) are shown in Table V. It should be noted that the “t” residues in Table V, and elsewhere, when referring to siRNA, should be replaced by “u” residues.

TABLE V

| | | | | | |
|---|---|---|---|---|---|
| | | SEQ. | | | |
| | | ID | | FORMULA | FORMULA |
| GENE | Name | NO. | FTLLSEQTENCE | VIII | IX |

| | | | | | |
|---|---|---|---|---|---|
| CLTC | NM_004859 | 0312 | GAAAGAATCTGTAGAGAAA | 76 | 94.2 |
| CLTC | NM_004859 | 0313 | GCAATGAGCTGTTTGAAGA | 65 | 39.9 |
| CLTC | NM_004859 | 0314 | TGACAAAGGTGGATAAATT | 57 | 38.2 |
| CLTC | NM_004859 | 0315 | GGAAATGGATCTCTTTGAA | 54 | 49.4 |
| CLTA | NM_001833 | 0316 | GGAAAGTAATGGTCCAACA | 22 | 55.5 |
| CLTA | NM_001833 | 0317 | AGACAGTTATGCAGCTATT | 4 | 22.9 |
| CLTA | NM_001833 | 0318 | CCAATTCTCGGAAGCAAGA | 1 | 17 |
| CLTA | NM_001833 | 0319 | GAAAGTAATGGTCCAACAG | −1 | −13 |
| CLTB | NM_001834 | 0320 | GCGCCAGAGTGAACAAGTA | 17 | 57.5 |
| CLTB | NM_001834 | 0321 | GAAGGTGGCCCAGCTATGT | 15 | −8.6 |
| CLTB | NM_001834 | 0322 | GGAACCAGCGCCAGAGTGA | 13 | 40.5 |
| CLTB | NM_001834 | 0323 | GAGCGAGATTGCAGGCATA | 20 | 61.7 |
| CALM | U45976 | 0324 | GTTAGTATCTGATGACTTG | 36 | −34.6 |
| CALM | U45976 | 0325 | GAAATGGAACCACTAAGAA | 33 | 46.1 |
| CALM | U45976 | 0326 | GGAAATGGAACCACTAAGA | 30 | 61.2 |
| CALM | U45976 | 0327 | CAACTACACTTTCCAATGC | 28 | 6.8 |
| EPS15 | NM_001981 | 0328 | CCACCAAGATTTCATGATA | 48 | 25.2 |
| EPS15 | NM_001981 | 0329 | GATCGGAACTCCAACAAGA | 43 | 49.3 |
| EPS15 | NM_001981 | 0330 | AAACGGAGCTACAGATTAT | 39 | 11.5 |
| EPS15 | NM_001981 | 0331 | CCACACAGCATTCTTGTAA | 33 | −23.6 |
| EPS15R | NM_021235 | 0332 | GAAGTTACCTTGAGCAATC | 48 | 33 |
| EPS15R | NM_021235 | 0333 | GGACTTGGCCGATCCAGAA | 27 | 33 |
| EPS15R | NM_021235 | 0334 | GCACTTGGATCGAGATGAG | 20 | 1.3 |
| EPS15R | NM_021235 | 0335 | CAAAGACCAATTCGCGTTA | 17 | 27.7 |
| DNM2 | NM_004945 | 0336 | CCGAATCAATCGCATCTTC | 6 | −29.6 |
| DNM2 | NM_004945 | 0337 | GACATGATCCTGCAGTTCA | 5 | −14 |
| DNM2 | NM_004945 | 0338 | GAGCGAATCGTCACCACTT | 5 | 24 |
| DNM2 | NM_004945 | 0339 | CCTCCGAGCTGGCGTCTAC | −4 | −63.6 |
| ARF6 | AF93885 | 0340 | TCACATGGTTAACCTCTAA | 27 | −21.1 |
| ARF6 | AF93885 | 0341 | GATGAGGGACGCCATAATC | 7 | −38.4 |
| ARF6 | AF93885 | 0342 | CCTCTAACTACAAATCTTA | 4 | 16.9 |
| ARF6 | AF93885 | 0343 | GGAAGGTGCTATCCAAAAT | 4 | 11.5 |
| RAB5A | BC001267 | 0344 | GCAAGCAAGTCCTAACATT | 40 | 25.1 |
| RAB5A | BC001267 | 0345 | GGAAGAGGAGTAGACCTTA | 17 | 50.1 |
| RAB5A | BC001267 | 0346 | AGGAATCAGTGTTGTAGTA | 16 | 11.5 |
| RAB5A | BC001267 | 0347 | GAAGAGGAGTAGACCTTAC | 12 | 7 |
| RAB5B | NM_002868 | 0348 | GAAAGTCAAGCCTGGTATT | 14 | 18.1 |
| RAB5B | NM_002868 | 0349 | AAAGTCAAGCCTGGTATTA | 6 | −17.8 |
| RAB5B | NM_002868 | 0350 | GCTATGAACGTGAATGATC | 3 | −21.1 |
| RAB5B | NM_002868 | 0351 | CAAGCCTGGTATTACGTTT | −7 | −37.5 |
| RAB5C | AF141304 | 0352 | GGAACAAGATCTGTCAATT | 38 | 51.9 |
| RAB5C | AF141304 | 0353 | GCAATGAACGTGAACGAAA | 29 | 43.7 |
| RAB5C | AF141304 | 0354 | CAATGAACGTGAACGAAAT | 18 | 43.3 |
| RAB5C | AF141304 | 0355 | GGACAGGAGCGGTATCACA | 6 | 18.2 |
| EEA1 | XM_018197 | 0356 | AGACAGAGCTTGAGAATAA | 67 | 64.1 |
| EEA1 | XM_018197 | 0357 | GAGAAGATCTTTATGCAAA | 60 | 48.7 |
| EEA1 | XM_018197 | 0358 | GAAGAGAAATCAGCAGATA | 58 | 45.7 |
| EEA1 | XM_018197 | 0359 | GCAAGTAACTCAACTAACA | 56 | 72.3 |
| AP2B1 | NM_001282 | 0360 | GAGCTAATCTGCCACATTG | 49 | −12.4 |
| AP2B1 | NM_001282 | 0361 | GCAGATGAGTTACTAGAAA | 44 | 48.9 |
| AP2B1 | NM_001282 | 0362 | CAACTTAATTGTCCAGAAA | 41 | 28.2 |
| AP2B1 | NM_001282 | 0363 | CAACACAGGATTCTGATAA | 33 | −5.8 |
| PLK | NM_005030 | 0364 | AGATTGTGCCTAAGTCTCT | −35 | −3.4 |
| PLK | NM_005030 | 0365 | ATGAAGATCTGGAGGTGAA | 0 | −4.3 |
| PLK | NM_005030 | 0366 | TTTGAGACTTCTTGCCTAA | −5 | −27.7 |
| PLK | NM_005030 | 0367 | AGATCACCCTCCTTAAATA | 15 | 72.3 |
| GAPDH | NM_002046 | 0368 | CAACGGATTTGGTCGTATT | 27 | −2.8 |
| GAPDH | NM_002046 | 0369 | GAAATCCCATCACCATCTT | 24 | 3.9 |
| GAPDH | NM_002046 | 0370 | GACCTCAACTACATGGTTT | 22 | −22.9 |
| GAPDH | NM_002046 | 0371 | TGGTTTACATGTTCCAATA | 9 | 9.8 |
| c-Myc | | 0372 | GAAGAAATCGATGTTGTTT | 31 | −11.7 |
| c-Myc | | 0373 | ACACAAACTTGAACAGCTA | 22 | 51.3 |
| c-Myc | | 0374 | GGAAGAAATCGATGTTGTT | 18 | 26 |
| c-Myc | | 0375 | GAAACGACGAGAACAGTTG | 18 | −8.9 |
| MAP2K1 | NM_002755 | 0376 | GCACATGGATGGAGGTTCT | 26 | 16 |
| MAP2K1 | NM_002755 | 0377 | GCAGAGAGAGCAGATTTGA | 16 | 0.4 |
| MAP2K1 | NM_002755 | 0378 | GAGGTTCTCTGGATCAAGT | 14 | 15.5 |
| MAP2K1 | NM_002755 | 0379 | GAGCAGATTTGAAGCAACT | 14 | 18.5 |
| MAP2K2 | NM_030662 | 0380 | CAAAGACGATGACTTCGAA | 37 | 26.4 |
| MAP2K2 | NM_030662 | 0381 | GATCAGCATTTGCATGGAA | 24 | −0.7 |
| MAP2K2 | NM_030662 | 0382 | TCCAGGAGTTTGTCAATAA | 17 | −4.5 |
| MAP2K2 | NM_030662 | 0383 | GGAAGCTGATCCACCTTGA | 16 | 59.2 |
| KNSL1(EG5) | NM_004523 | 0384 | GCAGAAATCTAAGGATATA | 53 | 35.8 |
| KNSL1(EG5) | NM_004523 | 0385 | CAACAAGGATGAAGTCTAT | 50 | 18.3 |
| KNSL1(EG5) | NM_004523 | 0386 | CAGCAGAAATCTAAGGATA | 41 | 32.7 |
| KNSL1(EG5) | NM_004523 | 0387 | CTAGATGGCTTTCTCAGTA | 39 | 3.9 |
| CyclophilinA | NM_021130 | 0388 | AGACAAGGTCCCAAAGACA | −16 | 58.1 |
| CyclophilinA | NM_021130 | 0389 | GGAATGGCAAGACCAGCAA | −6 | 36 |
| CyclophilinA | NM_021130 | 0390 | AGAATTATTCCAGGGTTTA | −3 | 16.1 |
| CyclophilinA | NM_021130 | 0391 | GCAGACAAGGTCCCAAAGA | 8 | 8.9 |
| LAMIN A/C | NM_170707 | 0392 | AGAAGCAGCTTCAGGATGA | 31 | 38.8 |
| LAMIN A/C | NM_170707 | 0393 | GAGCTTGACTTCCAGAAGA | 33 | 22.4 |
| LAMIN A/C | NM_170707 | 0394 | CCACCGAAGTTCACCCTAA | 21 | 27.5 |
| LAMIN A/C | NM_170707 | 0395 | GAGAAGAGCTCCTCCATCA | 55 | 30.1 |
| CyclophilinB | M60857 | 0396 | GAAAGAGCATCTACGGTGA | 41 | 83.9 |
| CyclophilinB | M60857 | 0397 | GAAAGGATTTGGCTACAAA | 53 | 59.1 |
| CyclophilinB | M60857 | 0398 | ACAGCAAATTCCATCGTGT | −20 | 28.8 |
| CyclophilinB | M60857 | 0399 | GGAAAGACTGTTCCAAAAA | 2 | 27 |
| DBI1 | NM_020548 | 0400 | CAACACGCCTCATCCTCTA | 27 | −7.6 |
| DBI2 | NM_020548 | 0401 | CATGAAAGCTTACATCAAC | 25 | −30.8 |
| DBI3 | NM_020548 | 0402 | AAGATGCCATGAAAGCTTA | 17 | 22 |
| DBI4 | NM_020548 | 0403 | GCACATACCGCCTGAGTCT | 15 | 3.9 |
| rLUC1 | | 0404 | GATCAAATCTGAAGAAGGA | 57 | 49.2 |
| rLUC2 | | 0405 | GCCAAGAAGTTTCCTAATA | 50 | 13.7 |
| rLUC3 | | 0406 | CAGCATATCTTGAACCATT | 41 | −2.2 |
| rLUC4 | | 0407 | GAACAAAGGAAACGGATGA | 39 | 29.2 |
| SeAP1 | NM_031313 | 0408 | CGGAAACGGTCCAGGCTAT | 6 | 26.9 |
| SeAP2 | NM_031313 | 0409 | GCTTCGAGCAGACATGATA | 4 | −11.2 |
| SeAP3 | NM_031313 | 0410 | CCTACACGGTCCTCCTATA | 4 | 4.9 |
| SeAP4 | NM_031313 | 0411 | GCCAAGAACCTCATCATCT | 1 | −9.9 |
| fLUC1 | | 0412 | GATATGGGCTGAATACAAA | 54 | 40.4 |
| fLUC2 | | 0413 | GCACTCTGATTGACAAATA | 47 | 54.7 |
| fLUC3 | | 0414 | TGAAGTCTCTGATTAAGTA | 46 | 34.5 |
| fLUC4 | | 0415 | TCAGAGAGATCCTCATAAA | 40 | 11.4 |
| mCyclo_1 | NM_008907 | 0416 | GCAAGAAGATCACCATTTC | 52 | 46.4 |
| mCyclo_2 | NM_008907 | 0417 | GAGAGAAATTTGAGGATGA | 36 | 70.7 |
| mCyclo_3 | NM_008907 | 0418 | GAAAGGATTTGGCTATAAG | 35 | −1.5 |
| mCyclo_4 | NM_008907 | 0419 | GAAAGAAGGCATGAACATT | 27 | 10.3 |
| BCL2_1 | NM_000633 | 0420 | GGGAGATAGTGATGAAGTA | 21 | 72 |
| BCL2_2 | NM_000633 | 0421 | GAAGTACATCCATTATAAG | 1 | 3.3 |
| BCL2_3 | NM_000633 | 0422 | GTACGACAACCGGGAGATA | 1 | 35.9 |
| BCL2_4 | NM_000633 | 0423 | AGATAGTGATGAAGTACAT | −12 | 22.1 |
| BCL2_5 | NM_000633 | 0424 | TGAAGACTCTGCTCAGTTT | 36 | 19.1 |
| BCL2_6 | NM_000633 | 0425 | GCATGCGGCCTCTGTTTGA | 5 | −9.7 |
| QB1 | NM_003365.1 | 0426 | GCACACAGCUUACUACAUC | 52 | −4.8 |
| QB2 | NM_003365.1 | 0427 | GAAAUGCCCUGGUAUCUCA | 49 | 22.1 |
| QB3 | NM_003365.1 | 0428 | GAAGGAACGUGAUGUGAUC | 34 | 22.9 |
| QB4 | NM_003365.1 | 0429 | GCACUACUCCUGUGUGUGA | 28 | 20.4 |
| ATE1-1 | NM_007041 | 0430 | GAACCCAGCUGGAGAACUU | 45 | 15.5 |
| ATE1-2 | NM_007041 | 0431 | GAUAUACAGUGUGAUCUUA | 40 | 12.2 |
| ATE1-3 | NM_007041 | 0432 | GUACUACGAUCCUGAUUAU | 37 | 32.9 |
| ATE1-4 | NM_007041 | 0433 | GUGCCGACCUUUACAAUUU | 35 | 18.2 |
| EGFR-1 | NM_005228 | 0434 | GAAGGAAACTGAATTCAAA | 68 | 79.4 |
| EGFR-1 | NM_005228 | 0435 | GGAAATATGTACTACGAAA | 49 | 49.5 |
| EGFR-1 | NM_005228 | 0436 | CCACAAAGCAGTGAATTTA | 41 | 7.6 |
| EGFR-1 | NM_005228 | 0437 | GTAACAAGCTCACGCAGTT | 40 | 25.9 |

[0345] Many of the genes to which the described siRNA are directed play critical roles in disease etiology. For this reason, the siRNAs listed in the sequence listing may potentially act as therapeutic agents. A number of prophetic examples follow and should be understood in view of the siRNA that are identified in the sequence listing. To isolate these siRNAs, the appropriate message sequence for each gene is analyzed using one of the before mentioned formulas (preferably formula VIII) to identify potential siRNA targets. Subsequently these targets are BLAST'ed to eliminate homology with potential off-targets.

### Example VII

### Evidence for the Benefits of Pooling

[0346] Evidence for the benefits of pooling have been demonstrated using the reporter gene, luciferase. Ninety siRNA duplexes were synthesized using Dharmacon proprietary ACE® chemistry against one of the standard reporter genes: firefly luciferase. The duplexes were designed to start two base pairs apart and to cover approximately 180 base pairs of the luciferase gene (see sequences in Table III). Subsequently, the siRNA duplexes were co-transfected with a luciferase expression reporter plasmid into HEK293 cells using standard transfection protocols and luciferase activity was assayed at 24 and 48 hours.

[0347] Transfection of individual siRNAs showed standard distribution of inhibitory effect. Some duplexes were active, while others were not. FIG. 15 represents a typical screen of ninety siRNA duplexes (SEQ. ID NO. 0032-0120) positioned two base pairs apart. As the figure suggests, the functionality of the siRNA duplex is determined more by a particular sequence of the oligonucleotide than by the relative oligonucleotide position within a gene or excessively sensitive part of the mRNA, which is important for traditional anti-sense technology.

[0348] When two continuous oligonucleotides were pooled together, a significant increase in gene silencing activity was observed (see FIGS. 16A and B). A gradual increase in efficacy and the frequency of pools functionality was observed when the number of siRNAs increased to 3 and 4 (FIGS. 16A, 16B, 17A, and 17B). Further, the relative positioning of the oligonucleotides within a pool did not determine whether a particular pool was functional (see FIGS. 18A and 18B, in which 100% of pools of oligonucleotides distanced by 2, 10 and 20 base pairs were functional).

[0349] However, relative positioning may nonetheless have an impact. An increased functionality may exist when the siRNA are positioned continuously head to toe (5′ end of one directly adjacent to the 3′ end of the others).

[0350] Additionally, siRNA pools that were tested performed at least as well as the best oligonucleotide in the pool, under the experimental conditions whose results are depicted in FIG. 19. Moreover, when previously identified non-functional and marginally (semi) functional siRNA duplexes were pooled together in groups of five at a time, a significant functional cooperative action was observed (see FIG. 20). In fact, pools of semi-active oligonucleotides were 5 to 25 times more functional than the most potent oligonucleotide in the pool. Therefore, pooling several siRNA duplexes together does not interfere with the functionality of the most potent siRNAs within a pool, and pooling provides an unexpected significant increase in overall functionality

### Example VIII

### Additional Evidence of the Benefits of Pooling

[0351] Experiments were performed on the following genes: P-galactosidase, Renilla luciferase, and Secreted alkaline phosphatase, which demonstrates the benefits of pooling. (see FIGS. 21A, 21B and 21C). Individual and pools of siRNA (described in Figure legends 21A-C) were transfected into cells and tested for silencing efficiency. Approximately 50% of individual siRNAs designed to silence the above-specified genes were functional, while 100% of the pools that contain the same siRNA duplexes were functional.

### Example IX

### Highly Functional siRNA

[0352] Pools of five siRNAs in which each two siRNAs overlap to 10-90% resulted in 98% functional entities (>80% silencing). Pools of siRNAs distributed throughout the mRNA that were evenly spaced, covering an approximate 20-2000 base pair range, were also functional. When the pools of siRNA were positioned continuously head to tail relative to mRNA sequences and mimicked the natural products of Dicer cleaved long double stranded RNA, 98% of the pools evidenced highly functional activity (>95% silencing).

### Example X

### Human Cyclophilin B

[0353] Table III above lists the siRNA sequences for the human cyclophilin B protein. A particularly functional siRNA may be selected by applying these sequences to any of Formula I to VII above.

[0354] Alternatively, one could pool 2, 3, 4, 5 or more of these sequences to create a kit for silencing a gene. Preferably, within the kit there would be at least one sequence that has a relatively high predicted functionality when any of Formulas I-VII is applied.

### Example XI

### Sample Pools of siRNAs and Their Application to Human Disease

[0355] The genetic basis behind human disease is well documented and siRNA may be used as both research or diagnostic tools and therapeutic agents, either individually or in pools. Genes involved in signal transduction, the immune response, apoptosis, DNA repair, cell cycle control, and a variety of other physiological functions have clinical relevance and therapeutic agents that can modulate expression of these genes may alleviate some or all of the associated symptoms. In some instances, these genes can be described as a member of a family or class of genes and siRNA (randomly, conventionally, or rationally designed) can be directed against one or multiple members of the family to induce a desired result.

[0356] To identify rationally designed siRNA to each gene, the sequence was analyzed using Formula VIII or Formula X to identify rationally designed siRNA. To confirm the activity of these sequences, the siRNA are introduced into a cell type of choice (e.g., HeLa cells, HEK293 cells) and the levels of the appropriate message are analyzed using one of several art proven techniques. siRNA having heightened levels of potency can be identified by testing each of the before mentioned duplexes at increasingly limiting concentrations. Similarly, siRNA having increased levels of longevity can be identified by introducing each duplex into cells and testing functionality at 24, 48, 72, 96, 120, 144, 168, and 192 hours after transfection. Agents that induce >95% silencing at sub-nanomolar concentrations and/or induce functional levels of silencing for >96 hours are considered hyperfunctional.

### Example XII

### Validation of Multigene Knockout Using Rab5 and Eps

[0357] Two or more genes having similar, overlapping functions often leads to genetic redundancy. Mutations that knockout only one of, e.g., a pair of such genes (also referred to as homologs) results in little or no phenotype due to the fact that the remaining intact gene is capable of fulfilling the role of the disrupted counterpart. To fully understand the function of such genes in cellular physiology, it is often necessary to knockout or knockdown both homologs simultaneously. Unfortunately, concomitant knockdown of two or more genes is frequently difficult to achieve in higher organisms (e.g., mice) thus it is necessary to introduce new technologies dissect gene function. One such approach to knocking down multiple genes simultaneously is by using siRNA. For example, FIG. 11 showed that rationally designed siRNA directed against a number of genes involved in the clathrin-mediated endocytosis pathway resulted in significant levels of protein reduction (e.g., >80%). To determine the effects of gene knockdown on clathrin-related endocytosis, internalization assays were performed using epidermal growth factor and transferrin. Specifically, mouse receptor-grade EGF (Collaborative Research Inc.) and iron-saturated human transferrin (Sigma) were iodinated as described previously (Jiang, X., Huang, F., Marusyk, A. & Sorkin, A. (2003) Mol Biol Cell 14, 858-70). HeLa cells grown in 12-well dishes were incubated with ¹²⁵I-EGF (1 ng/ml) or ¹²⁵I-transferrin (1 μg/ml) in binding medium (DMEM, 0.1% bovine serum albumin) at 37° C., and the ratio of internalized and surface radioactivity was determined during 5-min time course to calculate specific internalization rate constant k_{c} as described previously (Jiang, X et al.). The measurements of the uptakes of radiolabeled transferrin and EGF were performed using short time-course assays to avoid influence of the recycling on the uptake kinetics, and using low ligand concentration to avoid saturation of the clathrin-dependent pathway (for EGF Lund, K. A., Opresko, L. K., Strarbuck, C., Walsh, B. J. & Wiley, H. S. (1990) J. Biol. Chem. 265, 15713-13723).

[0358] The effects of knocking down Rab5a, 5b, 5c, Eps, or Eps 15R (individually) are shown in FIG. 22 and demonstrate that disruption of single genes has little or no effect on EGF or Tfn internalization. In contrast, simultaneous knock down of Rab5a, 5b, and 5c, or Eps and Eps 15R, leads to a distinct phenotype (note: total concentration of siRNA in these experiments remained constant with that in experiments in which a single siRNA was introduced, see FIG. 23). These experiments demonstrate the effectiveness of using rationally designed siRNA to knockdown multiple genes and validates the utility of these reagents to override genetic redundancy.

### Example XIII

### Validation of Multigene Targeting Using G6PD, GAPDH, PLK, and UQC

[0359] Further demonstration of the ability to knock down expression of multiple genes using rationally designed siRNA was performed using pools of siRNA directed against four separate genes. To achieve this, siRNA were transfected into cells (total siRNA concentration of 100 nM) and assayed twenty-four hours later by B-DNA. Results shown in FIG. 24 show that pools of rationally designed molecules are capable of simultaneously silencing four different genes.

### Example XIV

### Validation of Multigene Knockouts as Demonstrated by Gene Expression Profiling, a Prophetic Example

[0360] To further demonstrate the ability to concomitantly knockdown the expression of multiple gene targets, single siRNA or siRNA pools directed against a collection of genes (e.g., 4, 8, 16, or 23 different targets) are simultaneously transfected into cells and cultured for twenty-four hours. Subsequently, mRNA is harvested from treated (and untreated) cells and labeled with one of two fluorescent probes dyes (e.g., a red fluorescent probe for the treated cells, a green fluorescent probe for the control cells.). Equivalent amounts of labeled RNA from each sample is then mixed together and hybridized to sequences that have been linked to a solid support (e.g., a slide, “DNA CHIP”). Following hybridization, the slides are washed and analyzed to assess changes in the levels of target genes induced by siRNA.

### Example XV

### Identifying Hyperfunctional siRNA

Identification of Hyperfunctional Bcl-2 siRNA

[0361] The ten rationally designed Bcl2 siRNA (identified in FIGS. 13, 14) were tested to identify hyperpotent reagents. To accomplish this, each of the ten Bcl-2 siRNA were individually transfected into cells at a 300 pM (0.3 nM) concentrations. Twenty-four hours later, transcript levels were assessed by B-DNA assays and compared with relevant controls. As shown in FIG. 25, while the majority of Bcl-2 siRNA failed to induce functional levels of silencing at this concentration, siRNA 1 and 8 induced >80% silencing, and siRNA 6 exhibited greater than 90% silencing at this subnanomolar concentration.

[0362] By way of prophetic examples, similar assays could be performed with any of the groups of rationally designed genes described in the Examples. Thus for instance, rationally designed siRNA sequences directed against a gene of interest could be introduced into cells at increasingly limiting concentrations to determine whether any of the duplexes are hyperfunctional.

### Example XVI

### Gene Silencing: Prophetic Example

[0363] Below is an example of how one might transfect a cell.

[0364] Select a cell line. The selection of a cell line is usually determined by the desired application. The most important feature to RNAi is the level of expression of the gene of interest. It is highly recommended to use cell lines for which siRNA transfection conditions have been specified and validated.

[0365] Plate the cells. Approximately 24 hours prior to transfection, plate the cells at the appropriate density so that they will be approximately 70-90% confluent, or approximately 1×10⁵ cells/ml at the time of transfection. Cell densities that are too low may lead to toxicity due to excess exposure and uptake of transfection reagent-siRNA complexes. Cell densities that are too high may lead to low transfection efficiencies and little or no silencing. Incubate the cells overnight. Standard incubation conditions for mammalian cells are 37° C. in 5% CO₂. Other cell types, such as insect cells, require different temperatures and CO₂ concentrations that are readily ascertainable by persons skilled in the art. Use conditions appropriate for the cell type of interest.

[0366] siRNA re-suspension. Add 20 μl siRNA universal buffer to each siRNA to generate a final concentration of 50 μM.

[0367] siRNA-lipid complex formation. Use RNase-free solutions and tubes. Using the following table, Table XI:

TABLE XI

| | |
|---|---|
| 96-WELL | 24-WELL |

MIXTURE 1 (TRANSIT-TKO-PLASMID DILUTION MIXTURE)

| | | | | |
|---|---|---|---|---|
| Opti-MEM | 9.3 | μl | 46.5 | μl |
| TransIT-TKO (1 μg/μl) | 0.5 | μl | 2.5 | μl |
| MIXTURE 1 FINAL VOLUME | 10.0 | μl | 50.0 | μl |

MIXTURE 2 (SIRNA DILUTION MIXTURE)

| | | | | |
|---|---|---|---|---|
| Opti-MEM | 9.0 | μl | 45.0 | μl |
| siRNA (1 μM) | 1.0 | μl | 5.0 | μl |
| MIXTURE 2 FINAL VOLUME | 10.0 | μl | 50.0 | μl |

MIXTURE 3 (SIRNA-TRANSFECTION REAGENT MIXTURE)

| | | | | |
|---|---|---|---|---|
| Mixture 1 | 10 | μl | 50 | μl |
| Mixture 2 | 10 | μl | 50 | μl |
| MIXTURE 3 FINAL VOLUME | 20 | μl | 100 | μl |

Incubate 20 minutes at room temperature

MIXTURE 4 (MEDIA-SIRNA/TRANSFECTION REAGENT
MIXTURE)

| | | | | |
|---|---|---|---|---|
| Mixture 3 | 20 | μl | 100 | μl |
| Complete media | 80 | μl | 400 | μl |
| MIXTURE 4 FINAL VOLUME | 100 | μl | 500 | μl |

Incubate 48 hours at 37° C.

[0368] Transfection. Create a Mixture 1 by combining the specified amounts of OPTI-MEM serum free media and transfection reagent in a sterile polystyrene tube. Create a Mixture 2 by combining specified amounts of each siRNA with OPTI-MEM media in sterile 1 ml tubes. Create a Mixture 3 by combining specified amounts of Mixture 1 and Mixture 2. Mix gently (do not vortex) and incubate at room temperature for 20 minutes. Create a Mixture 4 by combining specified amounts of Mixture 3 to complete media. Add appropriate volume to each cell culture well. Incubate cells with transfection reagent mixture for 24-72 hours at 37° C. This incubation time is flexible. The ratio of silencing will remain consistent at any point in the time period. Assay for gene silencing using an appropriate detection method such as RT-PCR, Western blot analysis, immunohistochemistry, phenotypic analysis, mass spectrometry, fluorescence, radioactive decay, or any other method that is now known or that comes to be known to persons skilled in the art and that from reading this disclosure would useful with the present invention. The optimal window for observing a knockdown phenotype is related to the mRNA turnover of the gene of interest, although 24-72 hours is standard. Final Volume reflects amount needed in each well for the desired cell culture format. When adjusting volumes for a Stock Mix, an additional 10% should be used to accommodate variability in pipetting, etc. Duplicate or triplicate assays should be carried out when possible.

### Example XVII

### siRNAs That Target Deubiquitination Enzymes

[0369] siRNAs that target nucleotide sequences for deubiquitination enzymes with the NCBI accession numbers denoted below and having sequences generated in silico by the algorithms herein, are provided. In various embodiments, the siRNAs are rationally designed. In various embodiments, the siRNAs are functional or hyperfunctional. These siRNA that have been generated by the algorithms of the present invention include:

| | | | |
|---|---|---|---|
| SEQ | | | +HL,26 |
| ID | | | |
| NO | Name | siRNASense | Accession |

| | | | |
|---|---|---|---|
| 438 | AMSH | AGAAGGAAGCAGAGGAAUU | NM_006463 |
| 439 | AMSH | CGGUAGAGGUGAAUGAAGA | NM_006463 |
| 440 | AMSH | GGGCAUCACCUGAGAAAGA | NM_006463 |
| 441 | AMSH | GAAGAAGGAAGCAGAGGAA | NM_006463 |
| 442 | AMSH | CAAUAUGAAUGGAGCUUAU | NM_006463 |
| 443 | AMSH | GCUCUGGAGUUGAGAUUAU | NM_006463 |
| 444 | AMSH | GUGGAAAACUGAUGAGGAA | NM_006463 |
| 445 | AMSH | GAAAGACACAGUAAAGAAA | NM_006463 |
| 446 | AMSH | ACACAGAGAACGAAGAAGA | NM_006463 |
| 447 | AMSH | AGAAAGACACAGUAAAGAA | NM_006463 |
| 448 | AMSH | GAAAAGAAAGACACAGUAA | NM_006463 |
| 449 | AMSH | GAAAUUAAGUAGCUCAGAA | NM_006463 |
| 450 | AMSH | CAACAGAAGCAGCAGCAAU | NM_006463 |
| 451 | AMSH | GAACAUGGCCAUCCAGCAA | NM_006463 |
| 452 | AMSH | GCUAACACAUCCCGAAGAA | NM_006463 |
| 453 | AMSH | GGAGAUUGCAUUUCCCAAA | NM_006463 |
| 454 | AMSH | CAACUGUAACUCAGAAAUU | NM_006463 |
| 455 | AMSH | UUACAAAUCUGCUGUCAUU | NM_006463 |
| 456 | AMSH | CUAGAAAGCUUUGGAAGUU | NM_006463 |
| 457 | AMSH | GAGUUGAGAUUAUCCGAAU | NM_006463 |
| 458 | AMSH | CAACACAGAGAACGAAGAA | NM_006463 |
| 459 | AMSH-LP | GAGUAGAGAUGGAGAGGAU | NM_020799 |
| 460 | AMSH-LP | AAUAGAAACCUGUGGAAUA | NM_020799 |
| 461 | AMSH-LP | UGGAGAAUGUAGAGGAAUU | NM_020799 |
| 462 | AMSH-LP | UGAUAGAGGCAGAAAGGAA | NM_020799 |
| 463 | AMSH-LP | UGAAGAAACUGAAGGAGAU | NM_020799 |
| 464 | AMSH-LP | GAAGAAGGAAAUUUGGAAA | NM_020799 |
| 465 | AMSH-LP | UAAUACAGUGAGAGGAAUA | NM_020799 |
| 466 | AMSH-LP | GAAUGUAUUUGCAGAUCAA | NM_020799 |
| 467 | AMSH-LP | UGGAAUACUCUGUGGAAAA | NM_020799 |
| 468 | AMSH-LP | GGACCAGACUAUUGUGACA | NM_020799 |
| 469 | AMSH-LP | UCUAAUACAGUGAGAGGAA | NM_020799 |
| 470 | AMSH-LP | ACGUAGAAUACCAAGAAUA | NM_020799 |
| 471 | AMSH-LP | CGUAGAAUACCAAGAAUAU | NM_020799 |
| 472 | AMSH-LP | AGAGUUAGCCCGAGGUCAA | NM_020799 |
| 473 | AMSH-LP | AGAGAUUGAUAGAGGCAGA | NM_020799 |
| 474 | AMSH-LP | UGUAUUUGGAAGAAGGAAA | NM_020799 |
| 475 | AMSH-LP | CAUGGAGAAUGUAGAGGAA | NM_020799 |
| 476 | AMSH-LP | AUGAAGAAACUGAAGGAGA | NM_020799 |
| 477 | AMSH-LP | GGAAGAAGGAAAUUUGGAA | NM_020799 |
| 478 | AMSH-LP | GGAAUAGAAACCUGUGGAA | NM_020799 |
| 479 | AMSH-LP | UCUAAGUGCUGUUCAGAAU | NM_020799 |
| 480 | AMSH-LP | GGAGAAUGUAGAGGAAUUA | NM_020799 |
| 481 | AMSH-LP | UCACCAAAGCAUAAAGACA | NM_020799 |
| 482 | AMSH-LP | GCAUAAAGACACUGGCAUC | NM_020799 |
| 483 | AMSH-LP | GUGGAAUACUCUGUGGAAA | NM_020799 |
| 484 | AMSH-LP | AAUUGGAGCAUCAGAGAUU | NM_020799 |
| 485 | AMSH-LP | GCAGAAAGGAAGCGGAUUG | NM_020799 |
| 486 | AMSH-LP | GGUCUGGAGUAGAGAUGGA | NM_020799 |
| 487 | AMSH-LP | CUGAAAAGCAGGAUAUUAU | NM_020799 |
| 488 | AMSH-LP | CUUCCUAACCAUCGAGAUU | NM_020799 |
| 489 | BAP1 | GAGCAAAGGAUAUGCGAUU | NM_004656 |
| 490 | BAP1 | CCACAAGUCUCAAGAGUCA | NM_004656 |
| 491 | BAP1 | GAGAAGAGGAAGAAGUUCA | NM_004656 |
| 492 | BAP1 | GGGUGCAAGUGGAGGAGAU | NM_004656 |
| 493 | BAP1 | CGUGAUUGAUGAUGAUAUU | NM_004656 |
| 494 | BAP1 | UCUACGACCUUCAGAGCAA | NM_004656 |
| 495 | BAP1 | GGGUCAUCAUGGAGCGUAU | NM_004656 |
| 496 | BAP1 | GAGGUAGAGAAGAGGAAGA | NM_004656 |
| 497 | BAP1 | UCAAAGAGUCCCAGAAGGA | NM_004656 |
| 498 | BAP1 | CCAUCAACGUCUUGGCUGA | NM_004656 |
| 499 | BAP1 | AGGAUGACGAGGAGGAUGA | NM_004656 |
| 500 | BAP1 | AGGAGGUAGAGAAGAGGAA | NM_004656 |
| 501 | BAP1 | AGGCUGAGAUUGCAAACUA | NM_004656 |
| 502 | BAP1 | UCAAGGAGGAGGUAGAGAA | NM_004656 |
| 503 | BAP1 | UGGAUGGGCUGAAGGUCUA | NM_004656 |
| 504 | BAP1 | UGUCAGUGCUGCAGCCCAA | NM_004656 |
| 505 | BAP1 | CCAACCUAGUGGAGCAGAA | NM_004656 |
| 506 | BAP1 | GUAGAGAAGAGGAAGAAGU | NM_004656 |
| 507 | BAP1 | AGGAUGACUAUGAGGAUGA | NM_004656 |
| 508 | BAP1 | CAGAUGAUGAGGAUGACUA | NM_004656 |
| 509 | BAP1 | AGAGAAGGACCCACAACUA | NM_004656 |
| 510 | BAP1 | CGGUUCUGCUGAUGGGCAA | NM_004656 |
| 511 | BAP1 | AGGAAGAAGUUCAAGAUUG | NM_004656 |
| 512 | BAP1 | AGGAAGGCAUGCUGGCCAA | NM_004656 |
| 513 | BAP1 | CUGGAUCAAUGAAUGAAUA | NM_004656 |
| 514 | BAP1 | AACCCAAGCUAGUGGUGAA | NM_004656 |
| 515 | BAP1 | CCAAGGAGCUGCUGGCACU | NM_004656 |
| 516 | BAP1 | AGGUAUAAGGGGAAGGGAA | NM_004656 |
| 517 | BAP1 | GCAGAGACAGGGUUGCUUA | NM_004656 |
| 518 | BAP1 | CCUACAAGGCCAAGCGCCA | NM_004656 |
| 519 | C10ORF29 | GAUGAUGACUGGAGGCAAA | NM_152586 |
| 520 | C10ORF29 | UAACCUAUCCAGAGAGAAA | NM_152586 |
| 521 | C10ORF29 | GAUAGAAGUUUGUCAGGUA | NM_152586 |
| 522 | C10ORF29 | GUGAGGAAGCCUUUGGAAA | NM_152586 |
| 523 | C10ORF29 | AGUACAGGUUUCAAGGAUA | NM_152586 |
| 524 | C10ORF29 | CAGGAAGGACUUUGAACUA | NM_152586 |
| 525 | C10ORF29 | GCAGUACAGUGCAGAGAAU | NM_152586 |
| 526 | C10ORF29 | GCAGCACAGUCAAUGGUAA | NM_152586 |
| 527 | C10ORF29 | CCUCAGAAUUGGAGUCUCU | NM_152586 |
| 528 | C10ORF29 | GAGCAGGAGACCUCAGAAU | NM_152586 |
| 529 | C10ORF29 | AGACAUAUACCAAGAGAAG | NM_152586 |
| 530 | C10ORF29 | CAGGGUGGACUGAGAAGAA | NM_152586 |
| 531 | C10ORF29 | CCAAACAGGCUCUGCAGAU | NM_152586 |
| 532 | C10ORF29 | UCAGGUAGUCUAAGGAAGA | NM_152586 |
| 533 | C12ORF6 | UCACAAAGCAGAAGAAUUA | NM_020367 |
| 534 | C12orf6 | CAAGAUAGACUUUGCAGAA | NM_020367 |
| 535 | C12ORF6 | AGAUAGACUUUGCAGAAAU | NM_020367 |
| 536 | C12orf6 | CAAACAAUGAAGUGGAUGA | NM_020367 |
| 537 | C12orf6 | GUGAAUUUGUGGAAGCAAU | NM_020367 |
| 538 | C12ORF6 | ACAAUGAAGUGGAUGACAU | NM_020367 |
| 539 | C12ORF6 | GAGAUUACAUAAACGGAGA | NM_020367 |
| 540 | C12ORF6 | GUUUCUUGCUCGAGUGCUA | NM_020367 |
| 541 | C12ORF6 | GAUGAUACCUGGAACCCAA | NM_020367 |
| 542 | C12orf6 | CAGAAAUGAAGCAAAUGAA | NM_020367 |
| 543 | C12ORF6 | GCAGAAAUGAAGCAAAUGA | NM_020367 |
| 544 | C12ORF6 | GGAGCUAUGUGAAUUUAUA | NM_020367 |
| 545 | C12orf6 | CAGCAGUGAAUUUGUGGAA | NM_020367 |
| 546 | C12orf6 | GGGAGAAUGUGAAUACUCA | NM_020367 |
| 547 | C12ORF6 | CAACAAACAAUGAAGUGGA | NM_020367 |
| 548 | C12orf6 | GAAGCAAUCUGCAUUCAUA | NM_020367 |
| 549 | C12ORF6 | GCACAAUCAAACACAUGAA | NM_020367 |
| 550 | C12ORF6 | UCUGCAAAGAUGACAUAAA | NM_020367 |
| 551 | C12ORF6 | UGACAUAAAGCAUGGGAAC | NM_020367 |
| 552 | C12ORF6 | CAAAGAUGACAUAAAGCAU | NM_020367 |
| 553 | C12orf6 | GCAAAGAUGACAUAAAGCA | NM_020367 |
| 554 | C12ORF6 | GAACCUAUUUUGCUAGAGA | NM_020367 |
| 555 | C12ORF6 | GCCUCAGAUUAAUGAACAA | NM_020367 |
| 556 | C12orf6 | AAGAUAGACUUUGCAGAAA | NM_020367 |
| 557 | C12orf6 | CAAGGAAGCUUUAUUCUUU | NM_020367 |
| 558 | C12ORF6 | GACAUGGACACGUCAGAUA | NM_020367 |
| 559 | C12ORF6 | CCUGAGUACUUGAUAGACU | NM_020367 |
| 560 | C12ORF6 | CUUCCAAAGACGGGAGCUA | NM_020367 |
| 561 | C12ORF6 | GGAGUUCUUUUGCAGGAAA | NM_020367 |
| 562 | C12ORF6 | UUGCUAAUCUCUUUGGGAA | NM_020367 |
| 563 | C14orf137 | CAGACUGGCUGGAGAAAUU | NM_023112 |
| 564 | C14orf137 | GGGAAAACAUAGUGGAUGA | NM_023112 |
| 565 | C14orf137 | UGAGAUUCCUUGUGUGAAA | NM_023112 |
| 566 | C14orf137 | GAACAAUUAGCAACAGAAA | NM_023112 |
| 567 | C14orf137 | ACAAUUAGCAACAGAAAGA | NM_023112 |
| 568 | C14orf137 | GAGGAAAAGCUCAAGGUUA | NM_023112 |
| 569 | C14orf137 | GCCGAUAAACAUUGAUUAA | NM_023112 |
| 570 | C14orf137 | CCACCAUGGUCUAUGAGAA | NM_023112 |
| 571 | C14orf137 | AAACAUUCUCCUAGCAUUA | NM_023112 |
| 572 | C14orf137 | CAACAAUACCUAUGUGUCA | NM_023112 |
| 573 | C14orf137 | CCACCUGGACAGAGGCUUA | NM_023112 |
| 574 | C140RF137 | AGGAUUUACCGGAGGAAAA | NM_023112 |
| 575 | C140RF137 | UGGUGGAACUGGUAGAGAA | NM_023112 |
| 576 | C14orf137 | UCACUGGAUUAUUGGUUAA | NM_023112 |
| 577 | C140RF137 | GGGAGAUCUUCAAGUUCAA | NM_023112 |
| 578 | C140RF137 | GGAGGAAAAUCGAGGAACU | NM_023112 |
| 579 | C14orf137 | GGGAACAAUUAGCAACAGA | NM_023112 |
| 580 | C14orf137 | CCAAUAGCACUCUCAGAUA | NM_023112 |
| 581 | C14orf137 | UCUGGAUACUUCAAGGAUA | NM_023112 |
| 582 | C14or1137 | CCGUUUACCUGCUCUAUAA | NM_023112 |
| 583 | C140RF137 | UCUACAGGGCCUUGGGCUA | NM_023112 |
| 584 | C140RF137 | UGGAACUGGUAGAGAAGGA | NM_023112 |
| 585 | C14orf137 | GGACAAAUGCUUUCUAACU | NM_023112 |
| 586 | C14orf137 | GGACAGAGGCUUACAAGAC | NM_023112 |
| 587 | C14orf137 | GGCCAUACCCCUUAAAUAA | NM_023112 |
| 588 | C14orf137 | CCUCAGGACCUUCAAGAUU | NM_023112 |
| 589 | C14orf137 | CUGCAGGGAUUUACUGGAA | NM_023112 |
| 590 | C14orf137 | GGAACAAUUAGCAACAGAA | NM_023112 |
| 591 | C14orf137 | GGUUCUAACUUCAGCAUUC | NM_023112 |
| 592 | C14orf137 | CAAUAGCACUCUCAGAUAU | NM_023112 |
| 593 | C15ORF16 | GGAAAGACGACAACGAUAA | NM_130901 |
| 594 | C15ORF16 | GGGAAAGACGACAACGAUA | NM_130901 |
| 595 | C15ORF16 | AGGACAAGGAGAAGGAGAA | NM_130901 |
| 596 | C15ORF16 | GCAAGGAGAAGAAGGCCAA | NM_130901 |
| 597 | C15ORF16 | GGACCUGGUGUUACGGAAA | NM_130901 |
| 598 | C15ORF16 | AGGCAACAAUGGUGGCUUU | NM_130901 |
| 599 | C15ORF16 | GCGUGUACAGCGAGGAUUU | NM_130901 |
| 600 | C15ORF16 | AGAAGGAGAAGCAGCGCAA | NM_130901 |
| 601 | C15ORF16 | CCACGCAGCUGGUGCUCAA | NM_130901 |
| 602 | C15ORF16 | CCAAGCAGCCAGAGCGAGA | NM_130901 |
| 603 | C15ORF16 | GAACAGAGAGACCAGCAAA | NM_130901 |
| 604 | C15ORF16 | AGACCAGCAAAGAGAACAA | NM_130901 |
| 605 | C15ORF16 | CCACGUACCCGCAGCAGAA | NM_130901 |
| 606 | C15ORF16 | ACGGCAAGGACAAGGAGAA | NM_130901 |
| 607 | C15ORF16 | GAGACCUGCUGGAAGGCAA | NM_130901 |
| 608 | C15ORF16 | GUUAAGAGACUCAGGUGGA | NM_130901 |
| 609 | C15ORF16 | ACGAGGAGAUGAUCGGCUA | NM_130901 |
| 610 | C15ORF16 | GGCAAGAACGGCAAGGACA | NM_130901 |
| 611 | C15ORF16 | UGACGGAUUCUGAGCACAA | NM_130901 |
| 612 | C15ORF16 | CGCUAGAAGCCAAGCUGAA | NM_130901 |
| 613 | C15ORF16 | GGUUCUGGCCUAUGAUCAA | NM_130901 |
| 614 | C15ORF16 | GAGAAGCAGCGCAAGGAGA | NM_130901 |
| 615 | C6.1A | GAAUAAAUCAGGAGACAAA | NM_024332 |
| 616 | C6.1A | CCACAAAACUCAACAAUAA | NM_024332 |
| 617 | C6.1A | GGGAAAGAGUUUAUGAAUU | NM_024332 |
| 618 | C6.1A | AGGAAAGGUAUGAGAGAAU | NM_024332 |
| 619 | C6.1A | CAACAGAGGCAGAGAGGUU | NM_024332 |
| 620 | C6.1A | GGAACUAACUGUUGAUACA | NM_024332 |
| 621 | C6.1A | GAGAGAACCCAGAAAUAAA | NM_024332 |
| 622 | C6.1A | GAAUAAAGUCUGUAGUCUA | NM_024332 |
| 623 | C6.1A | AGGAAGAGCUUAUGCAAGA | NM_024332 |
| 624 | C6.1A | GCACAGAGAAGGAGGAAGU | NM_024332 |
| 625 | C6.1A | GCAAUUCAAUGGAGGAAGA | NM_024332 |
| 626 | C6.1A | GAGGAAGGACCGAGUAGAA | NM_024332 |
| 627 | C6.1A | GGACCUACAUACACACAAA | NM_024332 |
| 628 | C6.1A | CGUCAGAAUUGUUCACAUU | NM_024332 |
| 629 | C6.1A | AAGAUAAGCUACAGAUUGA | NM_024332 |
| 630 | C6.1A | AGAAGGAAGAGGAAAGGUA | NM_024332 |
| 631 | C6.1A | GAAGAUAAGAACACAAAGA | NM_024332 |
| 632 | C6.1A | GCAUAUACUGGAACUGAAA | NM_024332 |
| 633 | C6.1A | CAGAGAAGGAGGAAGUAAU | NM_024332 |
| 634 | C6.1A | AGGACAGACUGGAGCAAAA | NM_024332 |
| 635 | C6.1A | GCAGAGGAACAGACACAUA | NM_024332 |
| 636 | C6.1A | GAAUAGCCUUUCUGACAAA | NM_024332 |
| 637 | C6.1A | GAACAGACACAUACGUCAA | NM_024332 |
| 638 | C6.1A | GAGGAAAGGUAUGAGAGAA | NM_024332 |
| 639 | C6.1A | AGGUAUGAGAGAAUCGAAA | NM_024332 |
| 640 | C6.1A | GACAUUCAUUCCAGAGAAA | NM_024332 |
| 641 | C6.1A | GGAAGGACCGAGUAGAAAU | NM_024332 |
| 642 | C6.1A | GUACAGCCACUCUGGGAAA | NM_024332 |
| 643 | C6.1A | GGGCCAGAAGGAAGAGGAA | NM_024332 |
| 644 | C6.1A | UAGAAUAAAUCAGGAGACA | NM_024332 |
| 645 | CEZANNE | CAAAGAUGAUAGUGACAAU | NM_020205 |
| 646 | CEZANNE | GCACUGAGACACUGGAGAA | NM_020205 |
| 647 | CEZANNE | UGGCAGAACAGAAGCAGAA | NM_020205 |
| 648 | CEZANNE | CAGCUGAGUCUGUUGGUAA | NM_020205 |
| 649 | CEZANNE | CUGAGACACUGGAGAAGAA | NM_020205 |
| 650 | CEZANNE | GGGCAAGGAGGCUAAACAA | NM_020205 |
| 651 | CEZANNE | GCAGAGAGGAAGAUCAUGA | NM_020205 |
| 652 | CEZANNE | GGAAAGAAUUGGGAUGUGA | NM_020205 |
| 653 | CEZANNE | AGAAGGGAGUUGAGAAGGA | NM_020205 |
| 654 | CEZANNE | CAAAGGAGGUUCUCAGUCA | NM_020205 |
| 655 | CEZANNE | CCGAUUGGCCAGUGUAAUU | NM_020205 |
| 656 | CGI-77 | CAUUAUAGUUGGUGAAGAA | NM_016023 |
| 657 | CGI-77 | CAGAAGAAUUUCAGAAGUA | NM_016023 |
| 658 | CGI-77 | ACAGAAACAUAGAGAGGAA | NM_016023 |
| 659 | CGI-77 | GAGAGGAACUGGAGCAAUU | NM_016023 |
| 660 | CGI-77 | ACAUAUGGAAAGUGAGAAA | NM_016023 |
| 661 | CGI-77 | GCACAAAAGAGACGGGAAA | NM_016023 |
| 662 | CGI-77 | ACAAACACCAAUAGAGAUA | NM_016023 |
| 663 | CGI-77 | GUAUAAAGCCAUUGAAGAU | NM_016023 |
| 664 | CGI-77 | GCAAAGAGAAGAAGGAGUU | NM_016023 |
| 665 | CGI-77 | GGAAAAGGAGCGAGAAGAA | NM_016023 |
| 666 | CGI-77 | CGAAGAGCUUGAUGAGGAA | NM_016023 |
| 667 | CGI-77 | GCAGCUAGACAGUUAGAAA | NM_016023 |
| 668 | CGI-77 | GAAGAUCAACUGAAAGAAA | NM_016023 |
| 669 | CG1-77 | CCGAAGAGCUUGAUGAGGA | NM_016023 |
| 670 | CGI-77 | AAGAAAUGGAACAGAAACA | NM_016023 |
| 671 | CGI-77 | AAAGAAAGCUGCAUUGGAA | NM_016023 |
| 672 | CGI-77 | CAGAAGUACUGUGAAGAUA | NM_016023 |
| 673 | CGI-77 | GAAAUGGAACAGAAACAUA | NM_016023 |
| 674 | CGI-77 | GGAGCGAGAAGAACGGAUA | NM_016023 |
| 675 | CGI-77 | GAGACAUGCAUAUGGCUUA | NM_016023 |
| 676 | CGI-77 | AGACAUAUGGAAAGUGAGA | NM_016023 |
| 677 | CGI-77 | GCUCAAAUAUUGGCAGCUA | NM_016023 |
| 678 | CGI-77 | GGUAUUGACCGAAGAGCUU | NM_016023 |
| 679 | CGI-77 | AGAAGGAGUUGCAAGCCAA | NM_016023 |
| 680 | CGI-77 | ACUUGGUGCUUGAGAAUCA | NM_016023 |
| 681 | CGI-77 | CAAUUGAAGCUGACUACUA | NM_016023 |
| 682 | CGI-77 | CCAGACAUAUGGAAAGUGA | NM_016023 |
| 683 | CGI-77 | GCUGAGAAGGCAUCGCAAA | NM_016023 |
| 684 | CGI-77 | UGACUACUAAGGAGAAUAA | NM_016023 |
| 685 | CGI-77 | CUAAGGAGAAUAAGAUAGA | NM_016023 |
| 686 | COPS5 | GGACAUACCCAAAGGGCUA | NM_006837 |
| 687 | COPS5 | CUACAAACCUCCUGAUGAA | NM_006837 |
| 688 | COPS5 | UGGAAUAAAUACUGGGUGA | NM_006837 |
| 689 | COPS5 | UGAAAGACAGUAUGAGAAA | NM_006837 |
| 690 | COPS5 | GGACUAAGGAUCACCAUUA | NM_006837 |
| 691 | COPS5 | ACAAAUACGACAAGAAACA | NM_006837 |
| 692 | COPS5 | GGUGAAACCAUGAUCAUUA | NM_006837 |
| 693 | COPS5 | CCGAAAAUCAGAAGACAAA | NM_006837 |
| 694 | COPS5 | GGAUUGAUGUCUCAGGUUA | NM_006837 |
| 695 | COPS5 | AACAAUAUCCGCAGGGAAA | NM_006837 |
| 696 | COPS5 | CUACAAAUACGACAAGAAA | NM_006837 |
| 697 | COPS5 | GUGAAUACGUUGAGUUCUU | NM_006837 |
| 698 | COPS5 | UAGGAAAGGUGGAUGGUGA | NM_006837 |
| 699 | COPS5 | GAACAAUAUCCGCAGGGAA | NM_006837 |
| 700 | COPS5 | AUACAUGGCUGCAUACAUA | NM_006837 |
| 701 | COPS5 | ACAAGAAACAGCAGCAAGA | NM_006837 |
| 702 | COPS5 | CUGAAAGACAGUAUGAGAA | NM_006837 |
| 703 | COPS5 | GAGAAGUACUUUACCUGAA | NM_006837 |
| 704 | COPS5 | AAGAAACAGCAGCAAGAAA | NM_006837 |
| 705 | COPS5 | AGAAACAGCAGCAAGAAAU | NM_006837 |
| 706 | COPS5 | CUUGAGCUGUUGUGGAAUA | NM_006837 |
| 707 | COPS5 | GGAGUUUCAUGUUGGGUUU | NM_006837 |
| 708 | COPS5 | CGGCGAAGCCCUGGACUAA | NM_006837 |
| 709 | COPS5 | CCUUAGAAGUCUCAUAUUU | NM_006837 |
| 710 | COPS5 | UAGAAACGCAUGACCGAAA | NM_006837 |
| 711 | COPS5 | CCUGAAAGACAGUAUGAGA | NM_006837 |
| 712 | COPS5 | GAAUAAAUACUGGGUGAAU | NM_006837 |
| 713 | COPS5 | AUGAAUACAUGGCUGCAUA | NM_006837 |
| 714 | COPS5 | GGAAUAAAUACUGGGUGAA | NM_006837 |
| 715 | COPS5 | GGUGAUUGAUCCAACAAGA | NM_006837 |
| 716 | CYLD | UGAAAGAAUUGGAGUGAUA | NM_015247 |
| 717 | CYLD | GGAAGAAGGUCGUGGUCAA | NM_015247 |
| 718 | CYLD | GGGUAGAACCUUUGCUAAA | NM_015247 |
| 719 | CYLD | CUUCAAGAAUGCAGCGUUA | NM_015247 |
| 720 | CYLD | CCGAAGAGGCUGAAUCAUA | NM_015247 |
| 721 | CYLD | CAUAAUAAACCAAAGGCUA | NM_015247 |
| 722 | CYLD | GCUCAUUGGCUGAAGUUAA | NM_015247 |
| 723 | CYLD | AAAGGAUGUUGUAGAGAUA | NM_015247 |
| 724 | CYLD | AUGUAUGAGUGUAGAGAAU | NM_015247 |
| 725 | CYLD | CCGGAUAUGUGGAGGGCUU | NM_015247 |
| 726 | CYLD | CUGUAAUGGAAGAGCUAAA | NM_015247 |
| 727 | CYLD | GUGAAGUAGUAGAAGAAAA | NM_015247 |
| 728 | CYLD | CGAAGAGGCUGAAUCAUAA | NM_015247 |
| 729 | CYLD | UGGCUGAAGUUAAGGAGAA | NM_015247 |
| 730 | CYLD | AAGUAAAGGCCUCCAAAUA | NM_015247 |
| 731 | CYLD | AGGAUGUUGUAGAGAUAAA | NM_015247 |
| 732 | CYLD | UGGGAGAGAUGGAUAUUUA | NM_015247 |
| 733 | CYLD | CAGAAACAGACUAAGUAAA | NM_015247 |
| 734 | CYLD | GAAAAGAAAGCUUAGGAUA | NM_015247 |
| 735 | CYLD | GAGUUGAAUUGCUGGAAGA | NM_015247 |
| 736 | CYLD | GGAUUUACCUCUGAAGAAA | NM_015247 |
| 737 | CYLD | GGGAAGUAUAGGACAGUAU | NM_015247 |
| 738 | CYLD | CACAAUGAGUUCAGGCUUA | NM_015247 |
| 739 | CYLD | AGAGAUAUCUACAGACUUU | NM_015247 |
| 740 | CYLD | UAGUGAAACCCAAGAGCUA | NM_015247 |
| 741 | CYLD | AAGAAGGCUUGGAGAUAAU | NM_015247 |
| 742 | CYLD | CAGAGUUACUUUUGGCAAU | NM_015247 |
| 743 | CYLD | AAGUGAAGUAGUAGAAGAA | NM_015247 |
| 744 | CYLD | AGAAAAUACUCCACCAAAA | NM_015247 |
| 745 | CYLD | AGAUAAUGAUUGGGAAGAA | NM_015247 |
| 746 | DKFZP434D0127 | GAAGGAUACUAAUGGGUAA | NM_032147 |
| 747 | DKFZP434D0127 | CCAACGAGUUACUGAGAAU | NM_032147 |
| 748 | DKFZP434D0127 | GGGACUGACCUCUGAGUUA | NM_032147 |
| 749 | DKFZP434D0127 | UCACAGAAGCCCAGAAACA | NM_032147 |
| 750 | DKFZP434D0127 | AAACGAAGGCCAAUAGUAA | NM_032147 |
| 751 | DKFZP434D0127 | GUAGAAAGAUGGAACUUAU | NM_032147 |
| 752 | DKFZP434D0127 | UGAAAGAGGUUGAUUUGUA | NM_032147 |
| 753 | DKFZP434D0127 | GAAAGAGGUUGAUUUGUAA | NM_032147 |
| 754 | DKFZP434D0127 | GGAAUUUCUUUGUGAACUU | NM_032147 |
| 755 | DKFZP434D0127 | CCAGAAACAACUUAUGAUA | NM_032147 |
| 756 | DKFZP434D0127 | GCAUUUGCCCUGAUGGAAA | NM_032147 |
| 757 | DKFZP434D0127 | AAUAGUAACUCCUGGUGUA | NM_032147 |
| 758 | DKFZP434D0127 | GUAAUAACCGAGAGAAGAU | NM_032147 |
| 759 | DKFZP761A052 | CAACACAUUCCAUGGGAUA | NM_017602 |
| 760 | DKFZP761A052 | UGUUUUAGCUCUUGCCAAA | NM_017602 |
| 761 | DKFZP761A052 | UGCAUGAGGUUGUGCGAAA | NM_017602 |
| 762 | DKFZP761A052 | UGGACUAUCUGAUGAAGAA | NM_017602 |
| 763 | DKFZP761A052 | CCACCUACAUUAACAGGAA | NM_017602 |
| 764 | DKFZP761A052 | CGGAAUAUCCACUAUAAUU | NM_017602 |
| 765 | DKFZP761A052 | UGAUGAAGAAUGCCAUAAA | NM_017602 |
| 766 | DKFZP761A052 | CAACAGUGAGGACGAGUAU | NM_017602 |
| 767 | DKFZP761A052 | CAGCACGCAUCGAGGCUAU | NM_017602 |
| 768 | DKFZP761A052 | GAGCAGUCUCUGAUGAAGA | NM_017602 |
| 769 | DKFZP761A052 | GCUACAACAGUGAGGACGA | NM_017602 |
| 770 | DKFZP761A052 | ACAGUGAGGACGAGUAUGA | NM_017602 |
| 771 | DKFZP761A052 | CAACAGGAAUACCUAGACA | NM_017602 |
| 772 | DKFZP761A052 | CAGCAAGCGGCGACGUCAA | NM_017602 |
| 773 | DKFZP761A052 | CAGGAGCAUUGGUUUGAAA | NM_017602 |
| 774 | DKFZP761A052 | AAAACAAAGUGCACAGAGA | NM_017602 |
| 775 | DKFZP761A052 | CUGUGGAGGUGUACCAGUA | NM_017602 |
| 776 | DKFZP761A052 | GCAUGGACUAUCUGAUGAA | NM_017602 |
| 777 | DKFZP761A052 | CUGCAGUGGUUGCGGGAUC | NM_017602 |
| 778 | DKFZP761A052 | GAUGCUAGAAGACAAGAAA | NM_017602 |
| 779 | DKFZP761A052 | ACAUUAACAGGAAGCGGAA | NM_017602 |
| 780 | DKFZP761A052 | CUAGACAGUAUGAAGAAAA | NM_017602 |
| 781 | DKFZP761A052 | CCGACUACUUCUCCAACUA | NM_017602 |
| 782 | DKFZP761A052 | CCUAGACAGUAUGAAGAAA | NM_017602 |
| 783 | DKFZP761A052 | AUUAACAGGAAGCGGAAAA | NM_017602 |
| 784 | DKFZP761A052 | GUUAGCUACCAUCGGAAUA | NM_017602 |
| 785 | DKFZP761A052 | CUGACCAGGUGUAUGGAGA | NM_017602 |
| 786 | DKFZP761A052 | AGUCAUGGAUUGAACAGCA | NM_017602 |
| 787 | DKFZP761A052 | UGAUGAAGAAUGCCGACUA | NM_017602 |
| 788 | DKFZP761A052 | GCAACCACAUUGAGAUGCA | NM_017602 |
| 789 | E2-EPF | CCUCCAACUCUGUCUCUAA | NM_014501 |
| 790 | E2-EPF | GGCACUGGGACCUGGAUUU | NM_014501 |
| 791 | E2-EPF | ACAAGGAGGUGACGACACU | NM_014501 |
| 792 | E2-EPF | GGAGAACUACGAGGAGUAU | NM_014501 |
| 793 | E2-EPF | UCAAGUGCCUGCUGAUCCA | NM_014501 |
| 794 | E2-EPF | GACACGUACUGCUGACCAU | NM_014501 |
| 795 | E2-EPF | CCGCAGCCAUGAACUCCAA | NM_014501 |
| 796 | E2-EPF | GCUACUUCCUGACCAAGAU | NM_014501 |
| 797 | E2-EPF | GGAGGUCUGUUCCGCAUGA | NM_014501 |
| 798 | E2-EPF | ACUGGGACCUGGAUUUGUU | NM_014501 |
| 799 | E2-EPF | UCAAGGUCUUUCCCAACGA | NM_014501 |
| 800 | E2-EPF | GCACUGGGACCUGGAUUUG | NM_014501 |
| 801 | E2-EPF | GUACUGCUGACCAUCAAGU | NM_014501 |
| 802 | FBXO7 | GGAAAGAACUGUACAGGAA | NM_012179 |
| 803 | FBXO7 | GUGCUGAUCUCGAGUGUUA | NM_012179 |
| 804 | FBXO7 | CCAGAAACCUUUUAAGAGA | NM_012179 |
| 805 | FBXO7 | GAAUAUGACCAAAGACCAA | NM_012179 |
| 806 | FBXO7 | AGGAAGAGGCACAUACAAA | NM_012179 |
| 807 | FBXO7 | UGAGAUUAGAAGUGUGAAA | NM_012179 |
| 808 | FBXO7 | ACAAAGAUCUUCAGAAACU | NM_012179 |
| 809 | FBXO7 | CCGGAGAAGUGGAAGUUGA | NM_012179 |
| 810 | FBXO7 | GCGUGAUUUUCGAGACAAU | NM_012179 |
| 811 | FBXO7 | CCUGUGUGCCUUUGGGAAA | NM_012179 |
| 812 | FBXO7 | ACUCCAGAAUAAUGAGCAA | NM_012179 |
| 813 | FBXO7 | GCACAUACAAAGAAAAGAA | NM_012179 |
| 814 | FBXO7 | CCUUGAUAGUGUUGAUACA | NM_012179 |
| 815 | FBXO7 | CAUUAGAGACCUUGUAUCA | NM_012179 |
| 816 | FBXO7 | CCGAAAGGGCGGUUUGUGA | NM_012179 |
| 817 | FBXO7 | AGACUAGCAUACAGGAUGA | NM_012179 |
| 818 | FBXO7 | UAGCAUACAGGAUGAACAA | NM_012179 |
| 819 | FBXO7 | GAAACCUGAUUGUUGUAAA | NM_012179 |
| 820 | FBXO7 | CAAAGAGAAACUAGGGGAA | NM_012179 |
| 821 | FBXO7 | GAACCUACCAGAUGUAUUU | NM_012179 |
| 822 | FBXO7 | AAAGAACUGUACAGGAAGA | NM_012179 |
| 823 | FBXO7 | CUGAGUCAAUUCAAGAUAA | NM_012179 |
| 824 | FBXO7 | CUGUACAGGAAGAGGCACA | NM_012179 |
| 825 | FBXO7 | GUGAAUCGGUGGAAGGGCA | NM_012179 |
| 826 | FBXO7 | CCACAGAUUCAGAGCAUUC | NM_012179 |
| 827 | FBXO7 | GAAUGACGACAGUAUGUUA | NM_012179 |
| 828 | FBXO7 | GAUGAACAACCAAGUGAUU | NM_012179 |
| 829 | FBXO7 | AGACACAGAUUGGAAAGAA | NM_012179 |
| 830 | FBXO7 | AGAGGCACAUACAAAGAAA | NM_012179 |
| 831 | FBXO7 | GGGUGUAUAAGCUGCAGUA | NM_012179 |
| 832 | FBXO8 | CGAAAGAACAGGAAGGAUU | NM_012180 |
| 833 | FBXO8 | CCAAAUGCACUGAGAGAAU | NM_012180 |
| 834 | FBXO8 | UGGCAAGGGUUGUGCAAAU | NM_012180 |
| 835 | FBXO8 | GGAGAAUGGCUGCGAGCAA | NM_012180 |
| 836 | FBXO8 | GGAGAGAUGUCUUGGAUGA | NM_012180 |
| 837 | FBXO8 | CCAAGGAGGCAUUGACAUA | NM_012180 |
| 838 | FBXO8 | UGAAGAGCGUGGAGAGUAU | NM_012180 |
| 839 | FBXO8 | GAAAUCAGUUCUUGCCAAA | NM_012180 |
| 840 | FBXO8 | CAGAUGAGGGAGUGAACUA | NM_012180 |
| 841 | FBXO8 | GCAAGGAAAUCGAAAGAAC | NM_012180 |
| 842 | FBXO8 | GAACCCACCUUUAGGAUUU | NM_012180 |
| 843 | FBXO8 | CGCCAAAGGAAAUAGCAAA | NM_012180 |
| 844 | FBXO8 | GAUGAUUCGCCAAAGGAAA | NM_012180 |
| 845 | FBXO8 | GCUGUUAACGAAUGAUAAA | NM_012180 |
| 846 | FBXO8 | AAGCAGAGCCACUGUCUAA | NM_012180 |
| 847 | FBXO8 | GCAUUAGAUUUGCCUGAAA | NM_012180 |
| 848 | FBXO8 | GAAGAGUGUUGAUUUGUUA | NM_012180 |
| 849 | FBXO8 | GAGAAUCUAUCUUGAUGAA | NM_012180 |
| 850 | FBXO8 | UGUGGAGAGUGGUCAGAAA | NM_012180 |
| 851 | FBXO8 | GGUCAAGGGUUGUGGAGAG | NM_012180 |
| 852 | FBXO8 | GGACAAGUAAAGUUUGAAU | NM_012180 |
| 853 | FBXO8 | AGGCAAGGAAAUCGAAAGA | NM_012180 |
| 854 | FBXO8 | CACCAAUCAUCGUAAACAA | NM_012180 |
| 855 | FBXO8 | CAAUAAGAACCCACCUUUA | NM_012180 |
| 856 | FBXO8 | GCCCUCAUGUGAAGAAUAA | NM_012180 |
| 857 | FBXO8 | GGUAAGUCCUUUAAACCAU | NM_012180 |
| 858 | FBXO8 | UGAUUUAAUGCGAGAACUU | NM_012180 |
| 859 | FBXO8 | CCAAGGACUUAGCAGAUAU | NM_012180 |
| 860 | FBXO8 | CAGGAAGGAUUCAUUAAUU | NM_012180 |
| 861 | FBXO8 | GAACAGGAAGGAUUCAUUA | NM_012180 |
| 862 | FBXW3 | GGGAAGAGUACAAGGACAA | NM_012165 |
| 863 | FBXW3 | GGGCAAGGCGGAAGAGGAA | NM_012165 |
| 864 | FBXW3 | GGAUGCAGCUAGAGGAUGA | NM_012165 |
| 865 | FBXW3 | GAAAGAGGCACAAGGAAGA | NM_012165 |
| 866 | FBXW3 | CAUCCAGACUGAAGACCAA | NM_012165 |
| 867 | FBXW3 | GGCACAAGGAAGAAAGUAU | NM_012165 |
| 868 | FBXW3 | GGGAAAGAGGCACAAGGAA | NM_012165 |
| 869 | FBXW3 | UGACACACUUGGACAGAGA | NM_012165 |
| 870 | FBXW3 | GGACAAGGAGGUCAGGUUU | NM_012165 |
| 871 | FBXW3 | GGAAGAUUGGCCUUGGUAA | NM_012165 |
| 872 | FBXW3 | GGAUGAUGCUUUGUACAUA | NM_012165 |
| 873 | FBXW3 | GAAGGAAGGGGAAGAGGAA | NM_012165 |
| 874 | FBXW3 | ACACUUGGACAGAGACUUU | NM_012165 |
| 875 | FBXW3 | CAGUGAAGGUGUCUCAGAA | NM_012165 |
| 876 | FBXW3 | GAUGAUGCUUUGUACAUAU | NM_012165 |
| 877 | FBXW3 | GAAGAAAGUAUGGGAAGGA | NM_012165 |
| 878 | FBXW3 | CCGCACCAGUGUCCGGAAA | NM_012165 |
| 879 | FBXW3 | AGGAGGAGAUGGGAAGAUU | NM_012165 |
| 880 | FBXW3 | UGAACUGUGUGGAUUGCAA | NM_012165 |
| 881 | FBXW3 | GAAGAUUGGCCUUGGUAAG | NM_012165 |
| 882 | FBXW3 | AAGUGGAGAUGCAGUCAGA | NM_012165 |
| 883 | FBXW3 | GAACUGUGUGGAUUGCAAA | NM_012165 |
| 884 | FBXW3 | GCACAAGGAAGAAAGUAUG | NM_012165 |
| 885 | FBXW3 | GGAGGUGAACUGUGUGGAU | NM_012165 |
| 886 | FBXW3 | GUACAUAUCCCAGGCUAAU | NM_012165 |
| 887 | FBXW3 | CGGGAAAGAGGCACAAGGA | NM_012165 |
| 888 | FBXW3 | GAGGUGAACUGUGUGGAUU | NM_012165 |
| 889 | FBXW3 | GGCGAGAGGCAUCAUCAAA | NM_012165 |
| 890 | FBXW3 | CCAGAUGGUGCCAGCUUGA | NM_012165 |
| 891 | FBXW3 | GAUUGGCCUUGGUAAGAUU | NM_012165 |
| 892 | FLJ11807 | AGACCAAGAUCCAGAAAGA | NM_024954 |
| 893 | FLJ11807 | CGGGAUGAGUUCUGGGACA | NM_024954 |
| 894 | FLJ11807 | CUGAAGAAAGAGCGGCUUA | NM_024954 |
| 895 | FLJ11807 | GCAAUGAGCCCCUGAAGAA | NM_024954 |
| 896 | FLJ11807 | GCUACGAUGAGCUGGGCAA | NM_024954 |
| 897 | FLJ11807 | GAGCAAACGGGAUGAGUUC | NM_024954 |
| 898 | FLJ11807 | CCAGAAAGAUUUUGUCAUC | NM_024954 |
| 899 | FLJ11807 | ACCAAGAUCCAGAAAGAUU | NM_024954 |
| 900 | FLJ11807 | CCAAGAUCCAGAAAGAUUU | NM_024954 |
| 901 | FLJ11807 | CUUGCAACCUUGUCAGAGA | NM_024954 |
| 902 | FLJ11807 | CUUAAGUGGAAGAGCGACU | NM_024954 |
| 903 | FLJ11807 | GGAGCAAACGGGAUGAGUU | NM_024954 |
| 904 | FLJ11807 | CAGCACAAUUGGCAGAGAU | NM_024954 |
| 905 | FLJ11807 | CCGGGAAGCUGCUCACAGA | NM_024954 |
| 906 | FLJ11807 | CAAGCGAGCAGGACGCAAU | NM_024954 |
| 907 | FLJ11807 | UGAAGAAAGAGCGGCUUAA | NM_024954 |
| 908 | FLJ11807 | ACACGGAGGAGGAGAGCCU | NM_024954 |
| 909 | FLJ11807 | AAGAGCGGCUUAAGUGGAA | NM_024954 |
| 910 | FLJ11807 | GCUACCAGCUGCCCAUCUA | NM_024954 |
| 911 | FLJ11807 | UCAUCCAGGUCAUCAUCAA | NM_024954 |
| 912 | FLJ11807 | GGAGACCAAGAUCCAGAAA | NM_024954 |
| 913 | FLJ11807 | AAGAAAGAGCGGCUUAAGU | NM_024954 |
| 914 | FLJ11807 | GCACAAUUGGCAGAGAUGA | NM_024954 |
| 915 | FLJ11807 | UUGCAACCUUGUCAGAGAA | NM_024954 |
| 916 | FLJ11807 | GCCGUGAGUUCCCGCUGAA | NM_024954 |
| 917 | FLJ11807 | CAUGGCACCCUCUGUGAAU | NM_024954 |
| 918 | FLJ11807 | GCAAACGGGAUGAGUUCUG | NM_024954 |
| 919 | FLJ11807 | CCACACACGGGCCUUGCAA | NM_024954 |
| 920 | FLJ11807 | AGAAAGAGCGGCUUAAGUG | NM_024954 |
| 921 | FLJ11807 | ACACGGGCCUUGCAACCUU | NM_024954 |
| 922 | FLJ12552 | GGUGAUUGAUGUAGGGAAA | NM_022832 |
| 923 | FLJ12552 | GGGAGAAUGUGUUGGCAUA | NM_022832 |
| 924 | FLJ12552 | AGUCAUAAGUUCAGGAUAU | NM_022832 |
| 925 | FLJ12552 | GGGAAAUGUUUGUACUAUA | NM_022832 |
| 926 | FLJ12552 | GGAACUGAUUCAUAAGAAA | NM_022832 |
| 927 | FLJ12552 | CAGAAGAAUUGGGUAGAUA | NM_022832 |
| 928 | FLJ12552 | GCAGGAUGCUCAUGAAUUU | NM_022832 |
| 929 | FLJ12552 | GGGUGCAAGUAUAGCUUUA | NM_022832 |
| 930 | FLJ12552 | CCAUGAAACUUACGCAGUA | NM_022832 |
| 931 | FLJ12552 | UGAGUAACCUCGAUAUUAA | NM_022832 |
| 932 | FLJ12552 | UUGGAAGGCUGUAGAAGUA | NM_022832 |
| 933 | FLJ12552 | CAGCAUUCAUGGAUAGAUU | NM_022832 |
| 934 | FLJ12552 | GCCCAAAGGCUCUGCAGUA | NM_022832 |
| 935 | FLJ12552 | CAAGAGAGUAACUGAAAGA | NM_022832 |
| 936 | FLJ12552 | GAGCAGAAUACAUCCAUUA | NM_022832 |
| 937 | FLJ12552 | GAAACAGGGUGAAGAGAAG | NM_022832 |
| 938 | FLJ12552 | CAAACAAGAAGCCCAGAAA | NM_022832 |
| 939 | FLJ12552 | GUAGCAAAGAUGAAGAUUU | NM_022832 |
| 940 | FLJ12552 | UGGAGCAGCUGCACAGAUA | NM_022832 |
| 941 | FLJ14981 | GGAGUGAGGUCGUGGGUUA | NM_032868 |
| 942 | FLJ14981 | CCAUCGAAGAGGAGAUCUA | NM_032868 |
| 943 | FLJ14981 | UGGAAGAGGAGGAGGAGGA | NM_032868 |
| 944 | FLJ14981 | GGAAGCGGGUGGACAGCAA | NM_032868 |
| 945 | FLJ14981 | GGGCUCAGGUAAUAAAGAA | NM_032868 |
| 946 | FLJ14981 | AGGAGUUGCUGAUGGAAGA | NM_032868 |
| 947 | FLJ14981 | GGGUCUCAGCAGAGGACAA | NM_032868 |
| 948 | FLJ14981 | GGACAAGAGUCGGAGACCA | NM_032868 |
| 949 | FLJ14981 | AGAAACUGGACAAGUACAA | NM_032868 |
| 950 | FLJ14981 | GCAAGAAGCUGGUGAACCC | NM_032868 |
| 951 | FLJ14981 | UGAUGGAAGAGGAGGAGGA | NM_032868 |
| 952 | FLJ14981 | CGGAUGGGCUCAGGUAAUA | NM_032868 |
| 953 | FLJ14981 | GGGCCUCUGUCAAGUACAA | NM_032868 |
| 954 | FLJ14981 | AGUACAAAGGCCAGAAACU | NM_032868 |
| 955 | FLJ14981 | CUUAAGAUCUCCUUGGCCA | NM_032868 |
| 956 | FLJ14981 | AGUCCAAGAUCUCGCCUUU | NM_032868 |
| 957 | FLJ14981 | UCAACAAGUUCCAGCCGUU | NM_032868 |
| 958 | FLJ14981 | CAGCCAGACGGAAGGAUCA | NM_032868 |
| 959 | FLJ14981 | CCGAGAUGCUGCUGGUGGA | NM_032868 |
| 960 | FLJ14981 | AGGAGGAGUUGCUGAUGGA | NM_032868 |
| 961 | FLJ14981 | CUGCAGGGCUCCAGCAAUG | NM_032868 |
| 962 | FLJ14981 | AGAUGCUGCUGGUGGAGUU | NM_032868 |
| 963 | FLJ14981 | CAAGUACAAAGGCCAGAAA | NM_032868 |
| 964 | FLJ14981 | ACGCACAGAUGGACUACCA | NM_032868 |
| 965 | FLJ14981 | UCGACAAGCUUAAGAUCUC | NM_032868 |
| 966 | FLJ14981 | ACACCUACCUCGACAAGCU | NM_032868 |
| 967 | FLJ14981 | GGUGGAAGUAACAUCCUUU | NM_032868 |
| 968 | FLJ14981 | GGAGCCAGGAGCACACCUA | NM_032868 |
| 969 | FLJ14981 | GGAUGGGCUCAGGUAAUAA | NM_032868 |
| 970 | FLJ14981 | GCUCAGGUAAUAAAGAAAC | NM_032868 |
| 971 | FLJ20113 | ACGAUAUCCUCUACAAAUA | NM_017670 |
| 972 | FLJ20113 | GAUCAAGGACCUCCACAAA | NM_017670 |
| 973 | FLJ20113 | GGUUGUAAAUGGUCCUAUU | NM_017670 |
| 974 | FLJ20113 | AGGAGUAUGCUGAAGAUGA | NM_017670 |
| 975 | FLJ20113 | CAAUUGAGGAUUUCCACAA | NM_017670 |
| 976 | FLJ20113 | GCAAGGAGAGCGACCACAU | NM_017670 |
| 977 | FLJ20113 | CCUAUCUACUCCUGAGCUU | NM_017670 |
| 978 | FLJ20113 | UGGAGGCACUGCUGGAUGA | NM_017670 |
| 979 | FLJ20I13 | UCUAUGGGAUCCUGGAAGU | NM_017670 |
| 980 | FLJ20113 | ACUACGAUAUCCUCUACAA | NM_017670 |
| 981 | FLJ20113 | GACCGAAUUCAGCAAGAGA | NM_017670 |
| 982 | FLJ20113 | CAACAUCUAUCAACAGAAG | NM_017670 |
| 983 | FLJ20113 | GCCAGGCGCUAGACAUGUA | NM_017670 |
| 984 | FLJ20727 | AGAUAAAGAUGGUGAACAA | NM_017944 |
| 985 | FLJ20727 | CGAGAGAAGCUUAGUGAAA | NM_017944 |
| 986 | FLJ20727 | GGAUAAGACAUUAAAGGAA | NM_017944 |
| 987 | FLJ20727 | CAACAUGUCAGCAGGAUAA | NM_017944 |
| 988 | FLJ20727 | GGAUGGAGCACCAAAUAAA | NM_017944 |
| 989 | FLJ20727 | GAGAAGUGAUGGUGAAAGU | NM_017944 |
| 990 | FLJ20727 | GGAAUCAUGUUGUGCACUA | NM_017944 |
| 991 | FLJ20727 | CCAUUUACCUGCUGAAACA | NM_017944 |
| 992 | FLJ20727 | CAGUAGAAAUGGCUUAUAA | NM_017944 |
| 993 | FLJ23251 | GGGAGAAGGACAAGGCAUA | NM_024818 |
| 994 | FLJ23251 | GAACAUACUCUGAGGAACA | NM_024818 |
| 995 | FLJ23251 | GCAUACAGCUUAUUGAUUA | NM_024818 |
| 996 | FLJ23251 | CAAAGGAUAUUGUAGGAUA | NM_024818 |
| 997 | FLJ23251 | AGACUUACCUGAAGGAAUU | NM_024818 |
| 998 | FLJ23251 | GCUCAGAGGUGGUGGAUUC | NM_024818 |
| 999 | FLJ23251 | AAGAAAACCUCAAAGGAUA | NM_024818 |
| 1000 | FLJ23251 | GAUUAGAGCUGGCAAGCAU | NM_024818 |
| 1001 | FLJ23251 | GGACAAAUCUGAUCCUGUA | NM_024818 |
| 1002 | FLJ23251 | GGACAUGGACAAUAAAGUA | NM_024818 |
| 1003 | FLJ23251 | AGUAUAUGAUCCUCAGAUA | NM_024818 |
| 1004 | FLJ23251 | UGUAAGCGACUAUGAGAAA | NM_024818 |
| 1005 | FLJ23251 | GGACAAGGCAUACAGCUUA | NM_024818 |
| 1006 | FLJ23251 | GGAACUAGCCAAUAUGAAU | NM_024818 |
| 1007 | FLJ23251 | GAAAUAACAUCCUCUCAAA | NM_024818 |
| 1008 | FLJ23251 | AUGAGGACAUGGACAAUAA | NM_024818 |
| 1009 | FLJ23277 | CAGAAAGGAUGGAGAACAU | NM_032236 |
| 1010 | FLJ23277 | CAAUAAAGCAUGAAAGUGA | NM_032236 |
| 1011 | FLJ23277 | GGUGAAUGGUAUAAGUUUA | NM_032236 |
| 1012 | FLJ23277 | CAUCAGACUUGAAGGAAAU | NM_032236 |
| 1013 | FLJ23277 | AGACGAAACUGCAAAGGAA | NM_032236 |
| 1014 | FLJ23277 | GUAGAAGAGUGGCGGAAAU | NM_032236 |
| 1015 | FLJ23277 | CCAAAUGCCUUAUGUCAAA | NM_032236 |
| 1016 | FLJ23277 | GAAAUUACAACUAGGGAUU | NM_032236 |
| 1017 | FLJ23277 | GGAAGAAAAUGAAGCCUUA | NM_032236 |
| 1018 | FLJ23277 | GCAAGAUGGUGAUGCAGAA | NM_032236 |
| 1019 | FLJ23277 | GAUGUAAACCCUUCAGAAA | NM_032236 |
| 1020 | FLJ23277 | GAGGAGUGGUGUAUUGAAA | NM_032236 |
| 1021 | FLJ23277 | GAACAAAGCAACGGAAAGA | NM_032236 |
| 1022 | FLJ23277 | GCAUAUUGCGUCUGAAGAA | NM_032236 |
| 1023 | FLJ25157 | GCAAGAACCAGAAAGAGAA | NM_152653 |
| 1024 | FLJ25157 | AGAAGGAACUUGCAGAAAU | NM_152653 |
| 1025 | FLJ25157 | CCAAAGGAGACAACAUUUA | NM_152653 |
| 1026 | FLJ25157 | CUGUAGUGCUGGACCCAAA | NM_152653 |
| 1027 | FLJ25157 | ACAAAGAGUUGAUGACAGU | NM_152653 |
| 1028 | FLJ25157 | CCAACAGAGCAGAGCAUGA | NM_152653 |
| 1029 | FLJ25157 | GAAUGGAGGUCAACUAUAU | NM_152653 |
| 1030 | FLJ25157 | CGAUGGAGAUCAACGUGAA | NM_152653 |
| 1031 | FLJ25157 | CCACACAGUACAUGACCAA | NM_152653 |
| 1032 | FLJ25157 | GCUGCUAAAUUGUCAACUA | NM_152653 |
| 1033 | FLJ25157 | GAUGACAGUCCAAGCACUA | NM_152653 |
| 1034 | FLJ25157 | GGAGACAACAUUUAUGAAU | NM_152653 |
| 1035 | FLJ25157 | CUAAAAGAAUUCAGAAGGA | NM_152653 |
| 1036 | FLJ25157 | GAAGGAACUUGCAGAAAUC | NM_152653 |
| 1037 | FLJ25157 | CAGAAGGAACUUGCAGAAA | NM_152653 |
| 1038 | FLJ25157 | UCAGCAAGAACCAGAAAGA | NM_152653 |
| 1039 | FLJ25157 | CCACUGAGGCACAAAGAGU | NM_152653 |
| 1040 | FLJ25157 | UCAGAAGGAACUUGCAGAA | NM_152653 |
| 1041 | FLJ25157 | CAAGAAUCUAUCACUGUAA | NM_152653 |
| 1042 | FLJ25157 | GAUGGAGAUCAACGUGAAA | NM_152653 |
| 1043 | FLJ25157 | UAUGAAUGGAGGUCAACUA | NM_152653 |
| 1044 | FLJ25157 | GCACAAAGAGUUGAUGACA | NM_152653 |
| 1045 | FLJ25157 | UCACCAGACUAUCCGUUUA | NM_152653 |
| 1046 | FLJ25157 | AGAUCAACGUGAAAGUGUU | NM_152653 |
| 1047 | FLJ25157 | ACAAGAAUCUAUCACUGUA | NM_152653 |
| 1048 | FLJ25157 | CAACUGGAGUCCGGCUUUA | NM_152653 |
| 1049 | FLJ25157 | GAGAUCAACGUGAAAGUGU | NM_152653 |
| 1050 | FLJ25157 | UGAAUGGAGGUCAACUAUA | NM_152653 |
| 1051 | FLJ25157 | GCAAAACCGCUGCUAAAUU | NM_152653 |
| 1052 | FLJ25157 | CAACUAGUGCUAAAAGAAU | NM_152653 |
| 1053 | FLJ30626 | GAAGAUGGUUGCAGAGGAA | NM_153210 |
| 1054 | FLJ30626 | GCAAGGAAACUCAAGGAAA | NM_153210 |
| 1055 | FLJ30626 | CAAGGAAACUCAAGGAAAA | NM_153210 |
| 1056 | FLJ30626 | GUGAAAGGCAGAAGCAUUA | NM_153210 |
| 1057 | FLJ30626 | CGUGAAAGGCAGAAGCAUU | NM_153210 |
| 1058 | FLJ30626 | ACAUCAAGCUUCCCAGAAA | NM_153210 |
| 1059 | FLJ30626 | CAAUAUAGAUCUUCCUUGA | NM_153210 |
| 1060 | FLJ30626 | GAGAACAGGAGGAAUGAGA | NM_153210 |
| 1061 | FLJ30626 | GCACUGGGCAUGUCACAAA | NM_153210 |
| 1062 | FLJ30626 | GGCAGAAGCAUUAGCAUGA | NM_153210 |
| 1063 | FLJ30626 | GGGCUUAUAUCCUGUUCUA | NM_153210 |
| 1064 | FLJ30626 | AGAGGGAGAUAAUGUGUAU | NM_153210 |
| 1065 | FLJ30626 | GAAGGCUGCUCGAGGAACA | NM_153210 |
| 1066 | FLJ30626 | GGAUGGUGAAGCUGAGUUU | NM_153210 |
| 1067 | FLJ30626 | GCAGCAGGCUAGCAGGUUU | NM_153210 |
| 1068 | FLJ30626 | GCACUGCGGGUGAGGAUGA | NM_153210 |
| 1069 | FLJ37318 | GCUCAGUCGUCAAUGUAAA | NM_152586 |
| 1070 | FLJ37318 | GGGAAGAGUCCACUGAACA | NM_152586 |
| 1071 | FLJ37318 | GGAAGAGUCCACUGAACAU | NM_152586 |
| 1072 | FLJ37318 | AAAGAUGAAUCCAUGGUAU | NM_152586 |
| 1073 | HP43.8KD | GGUAAUAGAUUUUCCAGAA | NM_032557 |
| 1074 | HP43.8KD | GGAAGUAAUUUUCGUGCUA | NM_032557 |
| 1075 | HP43.8KD | CAAAAUGCAUCAUGGAAAA | NM_032557 |
| 1076 | HP43.8KD | CCAGUGAAGAGAAGAUUAA | NM_032557 |
| 1077 | HP43.8KD | CCAAUGGAUUUGAUGACAA | NM_032557 |
| 1078 | HP43.8KD | UGUUUGAACUGCAGGAGUA | NM_032557 |
| 1079 | HP43.8KD | AAAGAGAGCUGCGGGAAUA | NM_032557 |
| 1080 | HP43.8KD | UAUACAAGAUGGUGGUCUA | NM_032557 |
| 1081 | HP43.8KD | UUAGAAGAAUUCAGAGGAA | NM_032557 |
| 1082 | HP43.8KD | GAGUAUAUCUUCUGUGGUU | NM_032557 |
| 1083 | HP43.8KD | GAUCAGAAGUAUCAUGUGA | NM_032557 |
| 1084 | HP43.8KD | AGACCCACCUCUACAGAAA | NM_032557 |
| 1085 | HP43.8KD | GAUGAAGCUUCCUGCACAA | NM_032557 |
| 1086 | HP43.8KD | UCACACAAGCCUUCUGAAA | NM_032557 |
| 1087 | HP43.8KD | AGAAGAACCAGUAGUUUAU | NM_032557 |
| 1088 | HSA243666 | GGACAUAAAGAAAGGGAAU | NM_017582 |
| 1089 | HSA243666 | AUGCUGAGGUUGAGAUAAA | NM_017582 |
| 1090 | HSA243666 | AGAGAAACUUGGAGCUGAA | NM_017582 |
| 1091 | HSA243666 | CAGUCGAACUCGUGAAUGA | NM_017582 |
| 1092 | HSA243666 | GAGAUAAAGACGGGACAUA | NM_017582 |
| 1093 | HSA243666 | GGAUGGUGAUCAUUGGUAA | NM_017582 |
| 1094 | HSA243666 | CCAAAGGAUGAAACAAAUA | NM_017582 |
| 1095 | HSA243666 | CUAGAAAGGGUUAGCAUUU | NM_017582 |
| 1096 | HSA243666 | UACCAAAGGAUGAAACAAA | NM_017582 |
| 1097 | HSA243666 | GCAACAUCACGGAGUCAUA | NM_017582 |
| 1098 | HSA243666 | ACACAGAAGACUUAGAUCA | NM_017582 |
| 1099 | HSA243666 | GCAUGGAACUUCUCACCAA | NM_017582 |
| 1100 | HSA243666 | AGAUAAAGACGGGACAUAA | NM_017582 |
| 1101 | HSA243666 | CUGAAACGAUGGUGUUAAU | NM_017582 |
| 1102 | HSA243666 | CAACAAAUCUCAAUACAGU | NM_017582 |
| 1103 | HSA243666 | AGAAAGGGUUAGCAUUUUA | NM_017582 |
| 1104 | HSA243666 | GGGAAAUUAUGGAUUCUUU | NM_017582 |
| 1105 | HSA243666 | CCAAAGAUGGCCAAGUGAA | NM_017582 |
| 1106 | HSHIN1 | GGAAGUAGCUGAUGAAGAU | NM_017493 |
| 1107 | HSHIN1 | GGGUAGGACAAGUGGAAAU | NM_199324 |
| 1108 | HSHIN1 | UCGAGAGAACAGAGAGAAA | NM_017493 |
| 1109 | HSHIN1 | GAGAGAACAGAGAGAAAUU | NM_017493 |
| 1110 | HSHIN1 | GAUGAAGAUAACAGUGAAA | NM_017493 |
| 1111 | HSHIN1 | AGAGAAAUUUGAAGCGUUU | NM_017493 |
| 1112 | HSHIN1 | GGAUGACAGUUGCAAGUAA | NM_017493 |
| 1113 | HSHIN1 | AUGAAUUGCUGUAUGAGAA | NM_017493 |
| 1114 | HSHIN1 | GAGAGAAAUUUGAAGCGUU | NM_199324 |
| 1115 | HSHIN1 | AGAAGGAUCAUUUGAAGAA | NM_017493 |
| 1116 | HSHIN1 | UAUCAGAUUCAGAGGAUGA | NM_017493 |
| 1117 | HSHIN1 | UCACAUACCCAGUAAUGAA | NM_017493 |
| 1118 | HSHIN1 | UGCCAUACAAGGAAAGUUA | NM_017493 |
| 1119 | HSHIN1 | UGGAAGUAGCUGAUGAAGA | NM_017493 |
| 1120 | HSHIN1 | ACAGGAAUGGGUAGGACAA | NM_017493 |
| 1121 | HSHIN1 | GGUAGGACAAGUGGAAAUA | NM_017493 |
| 1122 | HSHIN1 | CUUCGAGAGAACAGAGAGA | NM_017493 |
| 1123 | HSHIN1 | GAACAGAGAGAAAUUUGAA | NM_017493 |
| 1124 | HSHIN1 | CGUUGGAAGUAGCUGAUGA | NM_017493 |
| 1125 | HSHIN1 | GGGACUGUUUGCUUUGAAA | NM_017493 |
| 1126 | HSHIN1 | CAUACCCAGUAAUGAAAUA | NM_017493 |
| 1127 | HSHIN1 | CUUAUGUACAGGAAAGAUU | NM_199324 |
| 1128 | HSHIN1 | CUGAUGAAGAUAACAGUGA | NM_017493 |
| 1129 | HSHIN1 | UCACUAUCUUCGAGAGAAC | NM_017493 |
| 1130 | HSHIN1 | AAUAUCAGAUUCAGAGGAU | NM_017493 |
| 1131 | HSHIN1 | GUGUAUCCCAUAAAGUAUA | NM_017493 |
| 1132 | HSHIN1 | UGAUGAAGAUAACAGUGAA | NM_017493 |
| 1133 | HSHIN1 | CGAGAGAACAGAGAGAAAU | NM_017493 |
| 1134 | HSHIN1 | AAGUAGCUGAUGAAGAUAA | NM_199324 |
| 1135 | HSHIN1 | CUUCACAAGUAACAGAAAA | NM_199324 |
| 1136 | KIAA0063 | CAGAAGAGGUAGAGGCUCA | NM_014876 |
| 1137 | KIAA0063 | GCAAAUGGCACUUGAAAGA | NM_014876 |
| 1138 | KIAA0063 | GGACAAAAGAGAAGCCAAA | NM_014876 |
| 1139 | KIAA0063 | GGAAAGGAGACAAGGCCAA | NM_014876 |
| 1140 | KIAA0063 | CGGCAGAGUUUUAUAAUGA | NM_014876 |
| 1141 | KIAA0063 | AGAAGAGCAUGCUGGGAAA | NM_014876 |
| 1142 | KIAA0063 | GCAUGUUGAUCCUGAGCAA | NM_014876 |
| 1143 | KIAA0063 | UGAAGGACCCAGAGCAUAA | NM_014876 |
| 1144 | KIAA0063 | CGUUAUAUCUUCUCAGCAA | NM_014876 |
| 1145 | KIAA0063 | GCAAAGACGCUUAAACAUU | NM_014876 |
| 1146 | KIAA0063 | AGACAGGCUUCUUGGAGUA | NM_014876 |
| 1147 | KIAA0063 | ACAAAUCUACCAUGAGAAA | NM_014876 |
| 1148 | KIAA0063 | AAACAUCAUUUGCGAGGAA | NM_014876 |
| 1149 | KIAA0063 | GGAUAUGCAAAGACGCUUA | NM_014876 |
| 1150 | KIAA0063 | CCACAAAUCUACCAUGAGA | NM_014876 |
| 1151 | KIAA0063 | AUAAAGGUCUCUCAGGAAA | NM_014876 |
| 1152 | KIAA0063 | CAUGGACACCAGAGAAUAA | NM_014876 |
| 1153 | KIAA0063 | UCACUAACGUCAUGGGCUU | NM_014876 |
| 1154 | KIAA0063 | CAUAAAGGUCUCUCAGGAA | NM_014876 |
| 1155 | KIAA0063 | CCAAGCGGCUACUGCGUUA | NM_014876 |
| 1156 | KIAA0063 | AAGAAGAGCAUGCUGGGAA | NM_014876 |
| 1157 | KIAA0063 | GGAAACUCCUCUCCACAAA | NM_014876 |
| 1158 | KIAA0063 | UGGCAGCACUUCAGACCAA | NM_014876 |
| 1159 | KIAA0063 | AAAUCUACCAUGAGAAACA | NM_014876 |
| 1160 | KIAA0063 | UGACAGUGGUAGCAAAAUA | NM_014876 |
| 1161 | KIAA0063 | GCAACUACGAUGUGAAUGU | NM_014876 |
| 1162 | KIAA0063 | GGAAAGUAUUGUGAAGACA | NM_014876 |
| 1163 | KIAA0063 | GGGAGGGAAUCCUAGCUUA | NM_014876 |
| 1164 | KIAA0063 | CGGGAUACGCUGCAAGAGA | NM_014876 |
| 1165 | KIAA0063 | CCACUGGCACUGUCAGAUA | NM_014876 |
| 1166 | KIAA0710 | CAAGAUGGCAGUAAAGAAA | NM_014871 |
| 1167 | KIAA0710 | AGGAGCAGGUGGUGGAUUA | NM_014871 |
| 1168 | KIAA0710 | GAAUUGACCCAGAUGGAAA | NM_014871 |
| 1169 | KIAA0710 | GGGUAUACAUUGUGCCUUU | NM_014871 |
| 1170 | KIAA0710 | GGUCACAGAUGGUGCUAUU | NM_014871 |
| 1171 | KIAA0710 | CCAAACAAGUCCCAAGAAU | NM_014871 |
| 1172 | KIAA0710 | UGACCCAGAUGGAAAGUAA | NM_014871 |
| 1173 | KIAA0710 | CACAGUAGUUCAAGACUUA | NM_014871 |
| 1174 | KIAA0710 | CAUCAAAUAUUCCAAGCUA | NM_014871 |
| 1175 | KIAA0710 | CCACAGUAGUUCAAGACUU | NM_014871 |
| 1176 | KIAA0710 | GAUACAACCUGAACAUCAA | NM_014871 |
| 1177 | KIAA0710 | GCUAUUAAUUGAACUGGAA | NM_014871 |
| 1178 | KIAA0710 | CCUGAUGGCUACUGUGGUA | NM_014871 |
| 1179 | KIAA0710 | AAGAACAACCUCAAGUAUA | NM_014871 |
| 1180 | KIAA0710 | GAUGGAAAGUAAUUGGUAU | NM_014871 |
| 1181 | KIAA1203 | GGUCAGUGUUGUUGGAAUA | NM_020718 |
| 1182 | KIAA1203 | AGAAGGAAAUCUUGGAGAA | NM_020718 |
| 1183 | KIAA1203 | UGAAAUUUGGCUUGGAUUA | NM_020718 |
| 1184 | KIAA1203 | AGAAAGGAGUGAAGAUGAU | NM_020718 |
| 1185 | KIAA1203 | CAGAUUGUGUUAACAGAAA | NM_020718 |
| 1186 | KIAA1203 | UGGAGAAGAUGAAGUAUUU | NM_020718 |
| 1187 | KIAA1203 | GAACCAAGCGACAGUCAUA | NM_020718 |
| 1188 | KIAA1203 | CAUCGUUCCUUUUGUGAUA | NM_020718 |
| 1189 | KIAA1203 | AGAAAGUGUUCGUCUGCAA | NM_020718 |
| 1190 | KIAA1203 | GAAGCAGUGUCUAUGGAAA | NM_020718 |
| 1191 | KIAA1203 | GUAUAUUCCUGAUGCAGAA | NM_020718 |
| 1192 | KIAA1203 | UGGCACUGCUCAUGUGAAA | NM_020718 |
| 1193 | KIAA1203 | CUUUGAGACUCCCGAAAUA | NM_020718 |
| 1194 | KIAA1203 | GAGAAAGGAGUGAAGAUGA | NM_020718 |
| 1195 | KIAA1203 | UGAAGAUGAUGGAGGCUUU | NM_020718 |
| 1196 | KIAA1203 | GACAAGGAGACAAGAGAUU | NM_020718 |
| 1197 | KIAA1203 | GCAGGGAAGCAUUACGUUA | NM_020718 |
| 1198 | KIAA1203 | CCUCAAACCUGCACUUUAU | NM_020718 |
| 1199 | KIAA1203 | CAGGGAAGCAUUACGUUAA | NM_020718 |
| 1200 | KIAA1203 | UGUAGUGUAUCAAGGCAAA | NM_020718 |
| 1201 | KIAA1203 | CAUGAAAGCGACUGCAUUU | NM_020718 |
| 1202 | KIAA1203 | CGUCAGAGUUUGUCAUCCA | NM_020718 |
| 1203 | KIAA1453 | CCGUAUAUGUCCCAGAAUA | NM_025090 |
| 1204 | KIAA1453 | GCACACAGCCACAGGUGAA | NM_025090 |
| 1205 | KIAA1453 | GAACAUCGGCAAUGGGAUU | NM_025090 |
| 1206 | KIAA1915 | GGACUGAGAAACAGAGCAA | XM_055481 |
| 1207 | KIAA1915 | GGUUAUAAGUGAGGAAAUU | XM_055481 |
| 1208 | KIAA1915 | AAGCUAAAUACCAGAGUUA | XM_055481 |
| 1209 | KIAA191S | GUUAGAGGCUUCAGUGUUA | XM_055481 |
| 1210 | KIAA1915 | AAAUGAAGAUAAAGGGACA | XM_055481 |
| 1211 | KIAA1915 | GGAUAAAGAAACACCAAAU | XM_055481 |
| 1212 | KIAA1915 | GGUUAGAAUUCAAGUAGUU | XM_055481 |
| 1213 | KIAA1915 | GAAAAGACAAGAUGGAUAA | XM_055481 |
| 1214 | KIAA1915 | AGGAAAGCCAUGAGGAAGA | XM_055481 |
| 1215 | KIAA1915 | CAGAAAAGAUGCAGUAGAA | XM_055481 |
| 1216 | KIAA1915 | GUACAGGACUACAGUGUGA | XM_055481 |
| 1217 | KIAA1915 | AAAGAAGAGAAGAGGAAAA | XM_055481 |
| 1218 | KIAA1915 | UGAAAAGACAAGAUGGAUA | XM_055481 |
| 1219 | KIAA1915 | AGAGGAAAGCCAUGAGGAA | XM_055481 |
| 1220 | KIAA1915 | GUGCAAAGUUCAUUGGGAU | XM_055481 |
| 1221 | KIAA1915 | GCCACAAACAGUUGACAAA | XM_055481 |
| 1222 | KIAA1915 | GCCAAAUGGUAGAGGAAAG | XM_055481 |
| 1223 | KIAA1915 | ACUCAGAAGUUGAUAAAGU | XM_055481 |
| 1224 | KIAA1915 | CAAAGGACUUAGAAGGACA | XM_055481 |
| 1225 | KIAA1915 | GAAAUAAUCCCUUACCAUA | XM_055481 |
| 1226 | KIAA1915 | GGCCAUAAUCUUCAAGUUA | XM_055481 |
| 1227 | KIAA1915 | CUGCUGAGGAGUUGGCAAA | XM_055481 |
| 1228 | KIAA1915 | ACAGAGCAAUGGUGACAAA | XM_055481 |
| 1229 | KIAA1915 | GCUUUAUGGCUGAAGAAUU | XM_055481 |
| 1230 | KIAA1915 | UCAAAUGCGGUCUGGAUAA | XM_055481 |
| 1231 | KIAA1915 | CUACAAAACCAGCCAGUUA | XM_055481 |
| 1232 | KIAA1915 | GAUAAAGGGACAAAGGCAU | XM_055481 |
| 1233 | KIAA1915 | UGAGGAAGACUCUGAGCAA | XM_055481 |
| 1234 | KIAA1915 | CAACCAAGAGAAUGGAGUA | XM_055481 |
| 1235 | KIAA1915 | AGUGAAGAGUUAUGCAAGA | XM_055481 |
| 1236 | LOC161725 | GCAAGAACGGCAAGGACAA | NM_130901 |
| 1237 | LOC161725 | CAGCAGACGCAGCAGAAUA | NM_130901 |
| 1238 | LOC161725 | GAUACAAUGUUAAGAGACU | NM_130901 |
| 1239 | LOC161725 | GCAAGGACAAGGAGAAGGA | NM_130901 |
| 1240 | LOC161725 | GUUCUACCUUCGAGGAUUU | NM_130901 |
| 1241 | LOC161725 | ACAAGGAGAAGGAGAAGCA | NM_130901 |
| 1242 | LOC161725 | AGAAGCAGCGCAAGGAGAA | NM_130901 |
| 1243 | LOC161725 | AGAGAGACCAGCAAAGAGA | NM_130901 |
| 1244 | LOC220213 | CAAACAAACUCAAGUGCAA | XM_166659 |
| 1245 | LOC220213 | CGACGAAGAACUUGCCAAA | XM_166659 |
| 1246 | LOC220213 | GAGUAAUGGCCACAGGAAA | XM_166659 |
| 1247 | LOC220213 | AGACAGAACACCAGCUAAU | XM_166659 |
| 1248 | LOC220213 | UGGAGGAGCACUUGACAAA | XM_166659 |
| 1249 | LOC220213 | CCAGCUAAUGAAAGAGUUA | XM_166659 |
| 1250 | LOC220213 | AUGAAAGAGUUAAGCGUGA | XM_166659 |
| 1251 | LOC220213 | GGGCAGAUGCUGAAUGUGA | XM_166659 |
| 1252 | LOC220213 | CCUAAGUGAUACUGCAUUU | XM_166659 |
| 1253 | LOC220213 | UGGAGAAGCAGGACAAGUA | XM_166659 |
| 1254 | LOC220213 | GCAAAGGAAACGCGACGAA | XM_166659 |
| 1255 | LOC220213 | GGAUGGGCCCUAAGUGAUA | XM_166659 |
| 1256 | LOC220213 | GGUCAGAGGUGCAAAGUUG | XM_166659 |
| 1257 | LOC220213 | GAGGAUUCCCUGAGGCCUA | XM_166659 |
| 1258 | LOC220213 | GCGAAGAGCACUUGGCGGA | XM_166659 |
| 1259 | LOC220213 | CAACAGAUGCUCAACAAAU | XM_166659 |
| 1260 | LOC220213 | ACGAGAAGCUGGCCCUAUA | XM_166659 |
| 1261 | LOC220213 | GGGAGCAGACGGUGCACUA | XM_166659 |
| 1262 | LOC220213 | GAGGAGCACUUGACAAAGA | XM_166659 |
| 1263 | LOC220213 | AGGUGGAGAAGCAGGACAA | XM_166659 |
| 1264 | LOC220213 | CAGUUAGGCUGGAGAAAUG | XM_166659 |
| 1265 | LOC220213 | UGGCCGAGGUGGAGAAGCA | XM_166659 |
| 1266 | LOC220213 | AAACUCAAGUGCAAAGGAA | XM_166659 |
| 1267 | LOC220213 | AAGGAAACGCGACGAAGAA | XM_166659 |
| 1268 | LOC220213 | GGAGAAAUGAGACAGAACA | XM_166659 |
| 1269 | LOC220213 | GACAACUGGUGCAAACAAA | XM_166659 |
| 1270 | LOC220213 | GCUCAGUAACGGACACUAU | XM_166659 |
| 1271 | LOC220213 | ACACUAUGAUGCUGUAUUU | XM_166659 |
| 1272 | LOC220213 | CCACCUACCUUGAGUAAUG | XM_166659 |
| 1273 | LOC220213 | GAAAUGAGACAGAACACCA | XM_166659 |
| 1274 | MGC10702 | AGAAAUAACUCCCAAACAA | NM_032663 |
| 1275 | MGC10702 | AGGCAACAAUUUAGAAGAA | NM_032663 |
| 1276 | MGC10702 | GUGCAAGUCUGAAGAAUGA | NM_032663 |
| 1277 | MGC10702 | GAAAGAAAGAAGCGUAGAA | NM_032663 |
| 1278 | MGC10702 | CCAAGAAGUUACUGAUGAU | NM_032663 |
| 1279 | MGC10702 | GGAAGACUCACUAGUAAUA | NM_032663 |
| 1280 | MGC10702 | ACAGGAUGCUCACGAAUUA | NM_032663 |
| 1281 | MGC10702 | CAAAUUACCUGCCGCACAA | NM_032663 |
| 1282 | MGC10702 | GGAGCAGCAGUCAGAAAUA | NM_032663 |
| 1283 | MGC10702 | GGGAGGUACCUUUGUCUAA | NM_032663 |
| 1284 | MGC10702 | CAGCAGGAAUAUAUGUUAU | NM_032663 |
| 1285 | MGC10702 | UGACAACUGUACAAAGAUU | NM_032663 |
| 1286 | MGC10702 | CAACACAACCCUAAACUGA | NM_032663 |
| 1287 | MGC10702 | AGGUGGUUCUGUUGUGUUA | NM_032663 |
| 1288 | MGC10702 | AUGGAAGACUCACUAGUAA | NM_032663 |
| 1289 | MGC10702 | CCACACCAGUUCUGAAUCA | NM_032663 |
| 1290 | MGC14793 | UGAUAUUGCUGUAGGUUUA | NM_032929 |
| 1291 | MGC14793 | CAUGAAACUUUGUGAAGAA | NM_032929 |
| 1292 | MGC14793 | GGUGAAAGAUCCAACUAAA | NM_032929 |
| 1293 | MGC14793 | GGAAAUGGAGACACAGAAA | NM_032929 |
| 1294 | MGC14793 | AGAAAGUACCGUAAGAUAA | NM_032929 |
| 1295 | MGC14793 | GCAAAUAGAGUUUAAGUGA | NM_032929 |
| 1296 | MGC14793 | GAGCAAUAGCUGAGAAUCU | NM_032929 |
| 1297 | MGC14793 | GCACAGACUUAUACUCUUA | NM_032929 |
| 1298 | MGC14793 | GUGAAUUUCUCAAGGUAUU | NM_032929 |
| 1299 | MGC14793 | GAUCAAAGAAAGUAGUACA | NM_032929 |
| 1300 | MGC14793 | GGAGGAAAAUGCAGAAAUU | NM_032929 |
| 1301 | MGC14793 | UAGAAAGUACCGUAAGAUA | NM_032929 |
| 1302 | MGC14793 | GCUCUAUGCUUUAUGAAAA | NM_032929 |
| 1303 | MGC14793 | AUAAGGAAAUGGAGACACA | NM_032929 |
| 1304 | MGC14793 | CUCAGAAUGUUUAGAAGAA | NM_032929 |
| 1305 | MGC14793 | AAAUGGAGACACAGAAAUU | NM_032929 |
| 1306 | MGC14793 | CGUGAAUCAUGUAAAGAGA | NM_032929 |
| 1307 | MGC14793 | GCUCAGAAUGUUUAGAAGA | NM_032929 |
| 1308 | MGC14793 | GAGAAUCUGUGGUCAGUUU | NM_032929 |
| 1309 | MGC14793 | GGGUGAAAGAUCCAACUAA | NM_032929 |
| 1310 | MGC14793 | GAGAAAGCCAAAAGAAGUA | NM_032929 |
| 1311 | MGC14793 | CAGCUUAUCCUCAUAUAUA | NM_032929 |
| 1312 | MGC14793 | UGAGGCAAAUAGAGUUUAA | NM_032929 |
| 1313 | MGC14793 | UCUAGAAAGUACCGUAAGA | NM_032929 |
| 1314 | MGC14793 | GCCUGGAAAUAAACACAUA | NM_032929 |
| 1315 | MGC14793 | GAACAGAGCCCCAUUGUAU | NM_032929 |
| 1316 | MGC14793 | UUACUGAUCUGAUGAAUGA | NM_032929 |
| 1317 | MGC14793 | UGUUACAGCUCUAUGCUUU | NM_032929 |
| 1318 | MGC14793 | GUAAUACCAUAAAGUGAGA | NM_032929 |
| 1319 | MGC14793 | CAGAAUGUUUAGAAGAAAG | NM_032929 |
| 1320 | MJD | CCAAAGAGGCAUUCAGCAA | NM_004993 |
| 1321 | MJD | CAAACAAAAUGAUGGGAAA | NM_030660 |
| 1322 | MJD | CUUUAGAAACUGUCAGAAA | NM_004993 |
| 1323 | MJD | GUUCAACAGUCCAGAGUAU | NM_030660 |
| 1324 | MJD | UCAAAGAGAUGAGGAAAUA | NM_030660 |
| 1325 | MJD | GCACUAAGUCGCCAAGAAA | NM_004993 |
| 1326 | MJD | ACGAAGAUGAGGAGGAUUU | NM_030660 |
| 1327 | MJD | GAAACAGCCUUCUGGAAAU | NM_030660 |
| 1328 | MJD | CCGCAGGGCUAUUCAGCUA | NM_004993 |
| 1329 | MJD | CAAGGUAGUUCCAGAAACA | NM_004993 |
| 1330 | MJD | CAAAUUAACCUUUCAGGAA | NM_030660 |
| 1331 | MJD | CAGGAAUGUUAGACGAAGA | NM_004993 |
| 1332 | MJD | AGUAAUGGUUCUAGAAGGA | NM_004993 |
| 1333 | MJD | AAUUACAACAGGAAGGUUA | NM_030660 |
| 1334 | MJD | CGAGAAGCCUACUUUGAAA | NM_030660 |
| 1335 | MJD | UGACAUGGAAGAUGAGGAA | NM_030660 |
| 1336 | MJD | UGGAGAAGAAUUAGCACAA | NM_030660 |
| 1337 | MJD | CUUGACGGGUCCAGAAUUA | NM_030660 |
| 1338 | MJD | CAACAGAUGCAUCGACCAA | NM_004993 |
| 1339 | MJD | ACUAAGUCGCCAAGAAAUU | NM_004993 |
| 1340 | MJD | GAUCACAACUUUUCUGCUA | NM_004993 |
| 1341 | MJD | GCUCAACAUUGCCUGAAUA | NM_004993 |
| 1342 | MJD | AGACCUGGAACGAGUGUUA | NM_030660 |
| 1343 | MJD | GGUAAUGUGUCAAAGAGAU | NM_030660 |
| 1344 | MJD | GGAAGAGACGAGAAGCCUA | NM_030660 |
| 1345 | MJD | CCAAGAAAUUGACAUGGAA | NM_030660 |
| 1346 | MJD | UGAAAUCAGCCUUGCACAA | NM_030660 |
| 1347 | MJD | ACAGGAAGGUUAUUCUAUA | NM_004993 |
| 1348 | MJD | AAGAAAUUGACAUGGAAGA | NM_030660 |
| 1349 | MJD | AGGUAGUUCCAGAAACAUA | NM_030660 |
| 1350 | NY-REN-60 | GGGAAGAAAUGGAAAGAAU | NM_032582 |
| 1351 | NY-REN-60 | GCUAAGAUCUCAAGUAAAA | NM_032582 |
| 1352 | NY-REN-60 | UCUCAAAGGCUGCGCAUUA | NM_032582 |
| 1353 | NY-REN-60 | AGGAAAGGGUUGUAGAUGA | NM_032582 |
| 1354 | OTUB1 | CCGACUACCUUGUGGUCUA | NM_017670 |
| 1355 | OTUB1 | CCGAAUUCAGCAAGAGAUU | NM_017670 |
| 1356 | OTUB1 | AGACCAGGCCUGACGGCAA | NM_017670 |
| 1357 | OTUB1 | CUGCCAAGAGCAAGGAAGA | NM_017670 |
| 1358 | OTUB1 | AGGUGGAGCCCAUGUGCAA | NM_017670 |
| 1359 | OTUB1 | GAGCAGGUGGAGAGGCAGA | NM_017670 |
| 1360 | OTUB1 | AGGAAGACCUGGUGUCCCA | NM_017670 |
| 1361 | OTUB1 | CGGCCUGGACACUACGAUA | NM_017670 |
| 1362 | OTUB1 | AAGAGAUUGCUGUGCAGAA | NM_017670 |
| 1363 | OTUB1 | AGAUCAAGGACCUCCACAA | NM_017670 |
| 1364 | OTUB1 | UCUAUCAACAGAAGAUCAA | NM_017670 |
| 1365 | OTUBI | ACAAGGAGUAUGCUGAAGA | NM_017670 |
| 1366 | OTUB1 | CAAGGAGUAUGCUGAAGAU | NM_017670 |
| 1367 | OTUB1 | GGAGUAUGCUGAAGAUGAC | NM_017670 |
| 1368 | OTUB1 | CCACCAAUCCGCACAUCUU | NM_017670 |
| 1369 | OTUB1 | GGCCUGGACACUACGAUAU | NM_017670 |
| 1370 | OTUB1 | CCGAAGGUGUUAACUGUCU | NM_017670 |
| 1371 | POH1 | CAAUAAGGCUGUAGAAGAA | NM_005805 |
| 1372 | POH1 | GGCAUUAAUUCAUGGACUA | NM_005805 |
| 1373 | POH1 | CUGAACAGCUGGCAAUAAA | NM_005805 |
| 1374 | POH1 | CAGAAGAUGUUGCUAAAUU | NM_005805 |
| 1375 | POH1 | ACAAUAAGGCUGUAGAAGA | NM_005805 |
| 1376 | POH1 | AAGGAAAGGUUGUUAUUGA | NM_005805 |
| 1377 | POH1 | CCAGAAAUAUGGACAGACU | NM_005805 |
| 1378 | POH1 | GUUUGACACUUCAGGACUA | NM_005805 |
| 1379 | POH1 | CUUAAGAGUUGUAGUUACU | NM_005805 |
| 1380 | PRPF8 | AGGAGAAGCUGCAGGAGAA | NM_006445 |
| 1381 | PRPF8 | GGGCCAAGUUCCUGGACUA | NM_006445 |
| 1382 | PRPF8 | GGAUAUGGCCGGAGUGUUU | NM_006445 |
| 1383 | PRPF8 | UGGCAAAGACAGUAACAAA | NM_006445 |
| 1384 | PRPF8 | GCUCAAAAGAAGAGGUAUU | NM_006445 |
| 1385 | PRPF8 | UGACAGACUUGGUGGAUGA | NM_006445 |
| 1386 | PRPF8 | CCAAGAUCAUGAAGGCAAA | NM_006445 |
| 1387 | PRPF8 | CAACAUGAAAUAUGAGCUA | NM_006445 |
| 1388 | PRPF8 | GGAUCAAGGUCGAGGUGCA | NM_006445 |
| 1389 | PRPF8 | CGGAUGAUGAUGAGGAAUU | NM_006445 |
| 1390 | PRPF8 | GAUGAAGACUGGAAUGAAU | NM_006445 |
| 1391 | PRPF8 | GGAAAUUGAGACAGUACAA | NM_006445 |
| 1392 | PRPF8 | CAGAAAUACUGGAUUGACA | NM_006445 |
| 1393 | PRPF8 | AGGAAUGAGCCAUGAAGAA | NM_006445 |
| 1394 | PRPF8 | GCAGAUGGAUUGCAGUAUA | NM_006445 |
| 1395 | PRPF8 | AACCAAGGAAAGAAAGAAA | NM_006445 |
| 1396 | PRPF8 | ACACAUCACUGGAGCCAUU | NM_006445 |
| 1397 | PRPF8 | ACAAAGAGUUCUACCACGA | NM_006445 |
| 1398 | PRPF8 | GAUUAAGCCUGCAGACACA | NM_006445 |
| 1399 | PRPF8 | GGACAUGAACCAUACGAAU | NM_006445 |
| 1400 | PRPF8 | CCAAAUUGCAGGAUACCUA | NM_006445 |
| 1401 | PRPF8 | CCAAGAAUGUGCUUAAGAA | NM_006445 |
| 1402 | PRPF8 | GAUAAGGGCUGGCGUGUCA | NM_006445 |
| 1403 | PRPF8 | CAGACUUGGUGGAUGACAA | NM_006445 |
| 1404 | PRPF8 | AGAACAACGUCGUCAUCAA | NM_006445 |
| 1405 | PRPF8 | CCUAUAAGCAUGACACCAA | NM_006445 |
| 1406 | PRPF8 | CAAUGUAUAUGUAGGCUUU | NM_006445 |
| 1407 | PRPF8 | AAGACUGAGUGGAGGGUCA | NM_006445 |
| 1408 | PRPF8 | GAAUCUAUGAAGUGGAAGA | NM_006445 |
| 1409 | PRPF8 | CGAGUGAAGGCGAGUGCAA | NM_006445 |
| 1410 | PSMD14 | GGACAUGAACCAAGACAAA | NM_005805 |
| 1411 | PSMD14 | CAAUAAAGAAUGUUGGCAA | NM_005805 |
| 1412 | PSMD14 | CUGUAGAAGAAGAAGAUAA | NM_005805 |
| 1413 | PSMD14 | CAAUGGAAGUUAUGGGUUU | NM_005805 |
| 1414 | PSMD14 | ACAAUGAAUCAGUGGUAAA | NM_005805 |
| 1415 | PSMD14 | GGACAGACUUCUUAGACUU | NM_005805 |
| 1416 | PSMD14 | UAAAGGAGAUGUUGGAAUU | NM_005805 |
| 1417 | PSMD14 | GAUUAUACCGUCAGAGUGA | NM_005805 |
| 1418 | PSMD14 | GUAAAGGAGAUGUUGGAAU | NM_005805 |
| 1419 | PSMD14 | ACACAAUGAAUCAGUGGUA | NM_005805 |
| 1420 | PSMD14 | CAAAUAUUGUCCAGUGUUU | NM_005805 |
| 1421 | PSMD14 | GUACUUAUGACCUCAAAUA | NM_005805 |
| 1422 | PSMD14 | AAUCAGUGGUAAAGGAGAU | NM_005805 |
| 1423 | PSMD14 | CAGCAGAACAAGUCUAUAU | NM_005805 |
| 1424 | PSMD14 | GGUCUUAGGACAUGAACCA | NM_005805 |
| 1425 | PSMD14 | AAGAAGAGUUGGAUGGAAG | NM_005805 |
| 1426 | PSMD14 | GAAGAAGAAGAUAAGAUGA | NM_005805 |
| 1427 | PSMD14 | AGAGUUGGAUGGAAGGUUU | NM_005805 |
| 1428 | PSMD14 | GAACCAAGACAAACAACUU | NM_005805 |
| 1429 | PSMD14 | GGGUUUGAUGCUUGGAGAA | NM_005805 |
| 1430 | PSMD14 | CAGAGUGAUUGAUGUGUUU | NM_005805 |
| 1431 | AD1 | UGUUAGAGGUGGAGGAUUU | NM_006590 |
| 1432 | AD1 | GGACUUUGACUUUGAGAAA | NM_006590 |
| 1433 | AD1 | ACAUAAAGGCCAAUGAUUA | NM_006590 |
| 1434 | AD1 | UUGGAGAGCUGAUGAGAAA | NM_006590 |
| 1435 | AD1 | AGGCAAAUGGUAUGAAUUA | NM_006590 |
| 1436 | AD1 | CUGAAGAAGUACACAAGAA | NM_006590 |
| 1437 | AD1 | GGAACUACUUUCUGGAAGA | NM_006590 |
| 1438 | AD1 | GAAGAAGUACACAAGAAUA | NM_006590 |
| 1439 | AD1 | GAGAAGGAAUAUAAGACUU | NM_006590 |
| 1440 | AD1 | GGCUGAUGAUGGUAAAUAA | NM_006590 |
| 1441 | AD1 | GAGAUAAUGAUGAAACCAA | NM_006590 |
| 1442 | AD1 | ACAGAUAAUUCCUUCCAAA | NM_006590 |
| 1443 | AD1 | GGAAGAGGCGAGAUAAUGA | NM_006590 |
| 1444 | AD1 | GGGAGUAGUUGAAGAACAG | NM_006590 |
| 1445 | AD1 | GAGGCGAGAUAAUGAUGAA | NM_006590 |
| 1446 | AD1 | GCAAAUGGUAUGAAUUACA | NM_006590 |
| 1447 | AD1 | GUAAAUAAGAACACAGAAG | NM_006590 |
| 1448 | AD1 | GCAAGCAGAAAGCCAGUAA | NM_006590 |
| 1449 | SBBI54 | CCAAGGAGGUGGAGGAGAA | NM_138334 |
| 1450 | SBBI54 | UGACCAAGGAGGUGGAGGA | NM_138334 |
| 1451 | SBBI54 | GGGAAAGGCCAGCACUUCA | NM_138334 |
| 1452 | SBBI54 | CGGCAACUAUGAUGUCAAU | NM_138334 |
| 1453 | SBBI54 | GCGAGGUGCUGCUGGUAGU | NM_138334 |
| 1454 | SBBI54 | GCAACUAUGAUGUCAAUGU | NM_138334 |
| 1455 | SBBI54 | UGGACGGUGUCUACUACAA | NM_138334 |
| 1456 | SBBI54 | GGAAAGGCCAGCACUUCAU | NM_138334 |
| 1457 | SBBI54 | ACUAUGAUGUCAAUGUGAU | NM_138334 |
| 1458 | SBBI54 | CCGCUGCUGCCUCAAUAAA | NM_138334 |
| 1459 | SBBI54 | GGAGGCUGCCGAUGAGAUC | NM_138334 |
| 1460 | SBBI54 | GCACCGGCAACUAUGAUGU | NM_138334 |
| 1461 | SBBI54 | GCUGCUGCCUCAAUAAAUC | NM_138334 |
| 1462 | SBBI54 | CAACUAUGAUGUCAAUGUG | NM_138334 |
| 1463 | SBBI54 | CCGAUGAGAUCUGCAAGAG | NM_138334 |
| 1464 | SBBI54 | GGACGGUGUCUACUACAAC | NM_138334 |
| 1465 | SBBI54 | UGCCGCUGCUGCCUCAAUA | NM_138334 |
| 1466 | SBBI54 | GGUGGACGGUGUCUACUAC | NM_138334 |
| 1467 | SBBI54 | GAGGUGGUGGUGGUAGUGA | NM_138334 |
| 1468 | SBBI54 | GAAAGGCCAGCACUUCAUG | NM_138334 |
| 1469 | SENP2 | GCGAAUUACUCGAGGAGAU | NM_021627 |
| 1470 | SENP2 | CCUCAUGCAUUGUGGGUUA | NM_021627 |
| 1471 | SENP2 | GAUUAUAUUUCUAGGGACA | NM_021627 |
| 1472 | SENP2 | GGAGUGGACUGGAGCGUAA | NM_021627 |
| 1473 | SENP2 | GAACAAACGCUAACUAAUA | NM_021627 |
| 1474 | SENP2 | AAGAAGAUGGUGUGGGAAA | NM_021627 |
| 1475 | SENP2 | GGUAAAUCUCUUUGAACAA | NM_021627 |
| 1476 | SENP2 | GGGUAAAUCUCUUUGAACA | NM_021627 |
| 1477 | SENP2 | CAGAGAAGAUGGUCGGAAU | NM_021627 |
| 1478 | SENP2 | GGAAGAAGAUGGUGUGGGA | NM_021627 |
| 1479 | SENP2 | GGAGAUAUUCAGACAUUAA | NM_021627 |
| 1480 | SENP2 | GGACAAACCUAUCACAUUU | NM_021627 |
| 1481 | SENP2 | CAAAGAAGUCAGAUGGACA | NM_021627 |
| 1482 | SENP2 | GGAAAUCAGUAAUGCCCUA | NM_021627 |
| 1483 | SENP2 | AGAGAAGUACCGAAAGUUA | NM_021627 |
| 1484 | SENP2 | GAGGAGAUAUUCAGACAUU | NM_021627 |
| 1485 | SENP2 | CCACAAAGCCCAUGGUAAC | NM_021627 |
| 1486 | SENP2 | GCUGAAACUGGGUAAUAAA | NM_021627 |
| 1487 | SENP2 | GGAACAACAUGCUGAAACU | NM_021627 |
| 1488 | SENP2 | AAAGAGAGGGACAGAAGAA | NM_021627 |
| 1489 | SENP2 | GGAGGAAAGUGUCAAUAAU | NM_021627 |
| 1490 | SENP2 | AAAGAGAGAAGUACCGAAA | NM_021627 |
| 1491 | SENP2 | GCAAAAUCACGGAGUCAAA | NM_021627 |
| 1492 | SENP2 | UUACAGAGGACAUGGAAAA | NM_021627 |
| 1493 | SENP2 | UGGAAAAGGAAAUCAGUAA | NM_021627 |
| 1494 | SENP2 | GAUGAAAGUAAGACCAAAA | NM_021627 |
| 1495 | SENP2 | CAGUAAUGCCCUAGGCCAU | NM_021627 |
| 1496 | SENP2 | CAUGAAACCACACGAGAUU | NM_021627 |
| 1497 | SENP2 | AAGAGGAAAGAGAGAAGUA | NM_021627 |
| 1498 | SENP2 | UGAUGAAAUACCAGCCAAA | NM_021627 |
| 1499 | TAMBP | CAGAAGAGCUGAAGGCAGA | NM_201647 |
| 1500 | TAMBP | CCAGCUGGGUAGUGCGGUA | NM_006463 |
| 1501 | TAMBP | UGGAAUUCUCUGUGGAAAA | NM_006463 |
| 1502 | TAMBP | UGUCAUUCCUGAAAAGAAA | NM_006463 |
| 1503 | TAMBP | CCAAAGCAGAAGAGCUGAA | NM_201647 |
| 1504 | TAMBP | GAAGGUAGACCCUGGCCUA | NM_006463 |
| 1505 | TAMBP | AGUGGAGACAUGUGGAAUU | NM_006463 |
| 1506 | TAMBP | CCUUCAUCCUCUAUAACAA | NM_201647 |
| 1507 | TAMBP | UCACACAACUGUAAGGCCA | NM_201647 |
| 1508 | TNFAIP3 | GGGAAGAUUUGAAGACUUA | NM_006290 |
| 1509 | TNFAIP3 | GCACCAUGUUUGAAGGAUA | NM_006290 |
| 1510 | TNFAIP3 | GAGCAGGAGAGGAAAGAUA | NM_006290 |
| 1511 | TNFAIP3 | CAUAUUUGCUCUAGAAGAA | NM_006290 |
| 1512 | TNFAIP3 | GCGGAAAGCUGUGAAGAUA | NM_006290 |
| 1513 | TNFAIP3 | UCACAAGAGUCAACAUUAA | NM_006290 |
| 1514 | TNFAIP3 | CAGCAUGAGUACAAGAAAU | NM_006290 |
| 1515 | TNFAIP3 | GCUAAGAAGUUUGGAAUCA | NM_006290 |
| 1516 | TNFAIP3 | GGGACGAGCAAGUGCAGAA | NM_006290 |
| 1517 | TNFAIP3 | CAGACUUGGUACUGAGGAA | NM_006290 |
| 1518 | TNFAIP3 | CAAAGUUGGAUGAAGCUAA | NM_006290 |
| 1519 | TNFAIP3 | GGAAUUGCAUCCAAGGUAU | NM_006290 |
| 1520 | TNFAIP3 | UACAAGAAAUGGCAGGAAA | NM_006290 |
| 1521 | TNFAIP3 | CAAAAGGACAGAAGAGCAA | NM_006290 |
| 1522 | TNFAIP3 | ACAAGAAAUGGCAGGAAAA | NM_006290 |
| 1523 | TNFAIP3 | GAAAAUGAGAUGAAGGAGA | NM_006290 |
| 1524 | TNFAIP3 | CAGAAGAGCAACUGAGAUC | NM_006290 |
| 1525 | TNFAIP3 | GCACAAUGGCUGAACAAGU | NM_006290 |
| 1526 | TNFAIP3 | GCUCAAGGAAACAGACACA | NM_006290 |
| 1527 | TNFAIP3 | AAAAUGAGAUGAAGGAGAA | NM_006290 |
| 1528 | TNFAIP3 | CAAUAGGAAGGCUAAAUAA | NM_006290 |
| 1529 | TNFAIP3 | CAACUCACUGGAAGAAAUA | NM_006290 |
| 1530 | TNFAIP3 | CCAGUAACCAUGAGUAUGA | NM_006290 |
| 1531 | TNFAIP3 | UUUGAAAGUGGGUGGAAUU | NM_006290 |
| 1532 | TNFAIP3 | GAAUUGCAUCCAAGGUAUA | NM_006290 |
| 1533 | TNFAIP3 | AGUACUUAAUGGUGAUAGA | NM_006290 |
| 1534 | TNFAIP3 | AGGCUUUGUAUUUGAGCAA | NM_006290 |
| 1535 | TNFAIP3 | AAACGAACGGUGACGGCAA | NM_006290 |
| 1536 | TNFAIP3 | AGAGAUUUCAUGAGGCCAA | NM_006290 |
| 1537 | TNFAIP3 | UCAUUGAAGCUCAGAAUCA | NM_006290 |
| 1538 | TRABID | GGGAGAAACUUUAGGAUAU | NM_017580 |
| 1539 | TRABID | GGUAAUAGCCAAAGGAGAU | NM_017580 |
| 1540 | TRABID | GGAGCUAGGUAAUGAGGAA | NM_017580 |
| 1541 | TRABID | GCAUGCAUCUUUUGAGAAA | NM_017580 |
| 1542 | TRABID | GGUUGUAGAAGGUGAUUUA | NM_017580 |
| 1543 | TRABID | UGUAAUGACCCUAAAGUUA | NM_017580 |
| 1544 | TRABID | GGAGAAACUUUAGGAUAUA | NM_017580 |
| 1545 | TRABID | CAGCAGAUAUUGAAGAUUU | NM_017580 |
| 1546 | TRABID | GAAGAAGAAUCUCCAAUUA | NM_017580 |
| 1547 | TRABID | GAAUUUAUCUCCAGUGUUU | NM_017580 |
| 1548 | TRABID | GGAAGUAGUCCUUUGAUAU | NM_017580 |
| 1549 | TRABID | ACAGAGAACUUUUGUUGAA | NM_017580 |
| 1550 | TRABID | CGUUAUAUCUCCUGCCUAU | NM_017580 |
| 1551 | TRABID | UCAAACAGCAGAAGACCAA | NM_017580 |
| 1552 | TRABID | GGAAGAUGAGGAUGAUGAA | NM_017580 |
| 1553 | TRFP | CAGAGAUGGUCUUGGAGAA | NM_004275 |
| 1554 | TRFP | GAAGGCAUCUAAAGAGAAA | NM_004275 |
| 1555 | TRFP | AGGCACAACUGGUUUGAUA | NM_004275 |
| 1556 | TRFP | CCUCAAGAAUGGUAAUUAU | NM_004275 |
| 1557 | TRFP | ACUACAAGAUGAAAGACAA | NM_004275 |
| 1558 | TRFP | GCAGUCAUGUGCUGAGUUA | NM_004275 |
| 1559 | TRFP | UAUGAAGAGUGGAGAAGUU | NM_004275 |
| 1560 | TRFP | ACAUGGAACUCUUCAACAA | NM_004275 |
| 1561 | TRFP | UCUACAAGGUUAUCAGGAA | NM_004275 |
| 1562 | TRFP | UCCUAGAGAUGGAGUAGAA | NM_004275 |
| 1563 | TRFP | GUUAAUGGCUUCUGUUACA | NM_004275 |
| 1564 | TRFP | GGAUUGUGCUGUAAUAAGA | NM_004275 |
| 1565 | TRFP | CCUGUUUGCUGAAGUGAUU | NM_004275 |
| 1566 | TRFP | GCUCAGUUCAGUACCAUAA | NM_004275 |
| 1567 | TRFP | GUGAAUGUAUGUACUGUAU | NM_004275 |
| 1568 | TRFP | GCUAUAAGAUCGAAGUUUG | NM_004275 |
| 1569 | TRFP | GAGGUAAUCAGAUGGUCUA | NM_004275 |
| 1570 | TRFP | GAAAUAUUCAUCCAGGUUA | NM_004275 |
| 1571 | TRFP | GAUCUUAGGGUUAGAAUAC | NM_004275 |
| 1572 | TRFP | AGGCCAAACUGCUAUAAGA | NM_004275 |
| 1573 | TRFP | AAAGAGAUGCUGGGACAUA | NM_004275 |
| 1574 | TRFP | CAAGUCAGGUGGUGGUCAU | NM_004275 |
| 1575 | TRFP | GAUCAAAGCAGACUCAUCA | NM_004275 |
| 1576 | TRFP | GCAAGAGUGUUCAGCAAAC | NM_004275 |
| 1577 | UBE1 | GCUCAGACCUGCAAGAGAA | NM_003334 |
| 1578 | UBE1 | GGGAGGAGGACAUCGGUAA | NM_003334 |
| 1579 | UBE1 | CGGCAGUGAAGCAGACAUA | NM_153280 |
| 1580 | UBE1 | GGUCAAGGCUGUUACCCUA | NM_003334 |
| 1581 | UBE1 | CAGCAGAACUGGUAGCCUU | NM_153280 |
| 1582 | UBE1 | UUUCAGAAGUACAGGGCAU | NM_153280 |
| 1583 | UBE1 | CCUUCUACCUUGUUUGAAA | NM_153280 |
| 1584 | UBE1 | CCUUAUACCUUUAGCAUCU | NM_003334 |
| 1585 | UBE1 | GGAGGAGGACAUCGGUAAA | NM_003334 |
| 1586 | UBE1 | GGAAAUCAGCCCAUGGAGA | NM_003334 |
| 1587 | UBE1 | CCAUUGACUUUGAGAAGGA | NM_153280 |
| 1588 | UBE1 | GAGAAAUCAUCGUUACAGA | NM_153280 |
| 1589 | UBE1 | GCUAUGGUUUCUAUGGUUA | NM_153280 |
| 1590 | UBE1 | AGUCAAAUCUGAAUCGACA | NM_153280 |
| 1591 | UBE1 | UCAAAGUACCUAAGAAGAU | NM_003334 |
| 1592 | UBE1 | AGAAGGAUGAUGACAGCAA | NM_153280 |
| 1593 | UBE1 | CAGACAAGCUCCCUGGAUU | NM_153280 |
| 1594 | UBE1 | GAAAUGAUCCUCACAGAUU | NM_153280 |
| 1595 | UBE1 | GCGUGGAGAUCGCUAAGAA | NM_003334 |
| 1596 | UBE1 | UCAAACAGUUCCUCGACUA | NM_003334 |
| 1597 | UBE1 | CCUGAAUCCUAAUAAAGAA | NM_153280 |
| 1598 | UBE1 | GGUCAAAGUACCUAAGAAG | NM_153280 |
| 1599 | UBE1 | UGCAAGAGAAGCUGGGCAA | NM_003334 |
| 1600 | UBE1 | UGGCCAAUGCCCUGGACAA | NM_003334 |
| 1601 | UBE1 | CAGAAAAUGUCAACCAGUA | NM_003334 |
| 1602 | UBE1 | GGGAUGAGUUUGAAGGCCU | NM_153280 |
| 1603 | UBE1 | GGGAUGUCACGAAGUUAAA | NM_153280 |
| 1604 | UBE1 | CGGCGAGGAUGUCGAGGUU | NM_003334 |
| 1605 | UBE1 | GAGUGGACAUUGUGGGAUC | NM_003334 |
| 1606 | UBE1 | GAAAUCAGCCCAUGGAGAU | NM_153280 |
| 1607 | UBE1C | AGAGAGAGAUUAUGAGCAA | NM_003968 |
| 1608 | UBE1C | GCGAGGAGCCGGAGAAGAA | NM_003968 |
| 1609 | UBE1C | GCCUAAAGAUAUUGGAAGA | NM_003968 |
| 1610 | UBE1C | AAUGAUACCUGGAGAGAGA | NM_003968 |
| 1611 | UBE1C | CAUUUGAAGCAGAAAGAAA | NM_198197 |
| 1612 | UBE1C | CAGAAGGUUUUAAAGGAAA | NM_198197 |
| 1613 | UBE1C | ACAGAAGGUUUUAAAGGAA | NM_003968 |
| 1614 | UBE1C | CAUUGGAGCUGGCGGCUUA | NM_003968 |
| 1615 | UBE1C | UGAAGUUGCUGCAGAAUUU | NM_003968 |
| 1616 | UBE1C | UACAGGAGGUUUUGGAUUA | NM_003968 |
| 1617 | UBE1C | GCUAAGAAGUUGAAUCGAU | NM_003968 |
| 1618 | UBE1C | GGAGCAGCCUUUUGGAGAA | NM_003968 |
| 1619 | UBE1C | GCUGAAUACCUGUGCAUGA | NM_003968 |
| 1620 | UBE1C | AAGCAGAAAGAAAGGAAAA | NM_003968 |
| 1621 | UBE1C | GAAGCAGAAAGAAAGGAAA | NM_003968 |
| 1622 | UBE1C | GCUGAUAUCUCUUCUAAAU | NM_003968 |
| 1623 | UBE1C | CAAUAGUGCUUCUCUGCAA | NM_003968 |
| 1624 | UBE1C | AGAGAGAGCAUCACAAUAU | NM_003968 |
| 1625 | UBE1C | GGUGUUACGUAUAGGCUCA | NM_198195 |
| 1626 | UBE1C | AGAUGAUCCUGAACAUAUA | NM_003968 |
| 1627 | UBE1C | CAGCUAAACUACAGGAGGU | NM_003968 |
| 1628 | UBE1C | GAAGAUGGAUAAAUGGCAU | NM_003968 |
| 1629 | UBE1C | GGCUGAAGUUGCUGCAGAA | NM_003968 |
| 1630 | UBE1C | GGUAACCUCUAUUGAAGAA | NM_003968 |
| 1631 | UBE1C | GGAACCAUGUAAAGAAGUU | NM_003968 |
| 1632 | UBE1C | AGAACACUGUAUUGAGUAU | NM_003968 |
| 1633 | UBE1C | GCUGGAACCAUGUAAAGAA | NM_003968 |
| 1634 | UBE1C | GAGAUGAUCCUGAACAUAU | NM_003968 |
| 1635 | UBE1C | GAAGAAAAGAAGGAGAAUA | NM_003968 |
| 1636 | UBE1C | GAAGAACGAACAAGGCCAA | NM_198195 |
| 1637 | UBE1DC1 | GGACAAACAUGGAUGGAAU | NM_024818 |
| 1638 | UBE1DC1 | GGAAGCAGCAGGAGGAAUA | NM_024818 |
| 1639 | UBE1DC1 | GCUUAUAAUUCCUGGAGAA | NM_198329 |
| 1640 | UBE1DC1 | AAUAAGUAAUGGUGGGUUA | NM_198329 |
| 1641 | UBE1DC1 | ACAAGAAGAGGAAGAGAUA | NM_024818 |
| 1642 | UBE1DC1 | GGUUAUACAAGAAGAGGAA | NM_198329 |
| 1643 | UBE1DC1 | AAGAAGAGGAAGAGAUAAU | NM_198329 |
| 1644 | UBE1DC1 | UGGAAGACCUCAUGGCCAA | NM_198329 |
| 1645 | UBE1DC1 | AGGAAAACCUGUUGAUCUA | NM_024818 |
| 1646 | UBE1DC1 | GCUCGAAUGACAAUAAAUA | NM_198329 |
| 1647 | UBE1DC1 | GAACUAGCCAAUAUGAAUA | NM_024818 |
| 1648 | UBE1DC1 | GGGAAUUGUAAGCGACUAU | NM_024818 |
| 1649 | UBE1DC1 | AAGUAAAGUUCAAGCAGCA | NM_024818 |
| 1650 | UBE1DC1 | ACAAGAGGUUAUACAAGAA | NM_198329 |
| 1651 | UBE1L | CUGCAAAGCUGGAGGAGCA | NM_003335 |
| 1652 | UBE1L | AGGAAGAGCCACUGGAAGA | NM_003335 |
| 1653 | UBE1L | AGGAAGUGCUGAAGGCAAU | NM_003335 |
| 1654 | UBE1L | CAGCACGGGUUGAGGGUGA | NM_003335 |
| 1655 | UBE1L | CUUCGAAGCUACUGGAUGA | NM_003335 |
| 1656 | UBE1L | UGGAAGAGCCACUGGAUGA | NM_003335 |
| 1657 | UBE1L | GGACAGAGGAAGAGCCACU | NM_003335 |
| 1658 | UBE1L | CCACAGAACUGGCAAGACU | NM_003335 |
| 1659 | UBE1L | CCCAAGACUGUGAGACAUA | NM_003335 |
| 1660 | UBE1L | CAGGAAGUGCUGAAGGCAA | NM_003335 |
| 1661 | UBE1L | GGGCCUGAACCCAGACUUA | NM_003335 |
| 1662 | UBE1L | UAAUAAAGUGCUUGAGGAU | NM_003335 |
| 1663 | UBE1L | UCUCGGGAAUUGAGGGAAU | NM_003335 |
| 1664 | UBE1L | GACCCAAGACUGUGAGACA | NM_003335 |
| 1665 | UBE1L | CAUCUUUGCUAGUAAUCUA | NM_003335 |
| 1666 | UBE1L | UGUCAUAAGCAUGGAGUUU | NM_003335 |
| 1667 | UBE1L | GGGCAGUGCUACAGUAUUC | NM_003335 |
| 1668 | UBE1L | AGCAGAAGGAACUGAACAA | NM_003335 |
| 1669 | UBE1L | GGGCUAUCACUGAAGUCAA | NM_003335 |
| 1670 | UBE1L | UGAACAAAGCCCUGGAAGU | NM_003335 |
| 1671 | UBE1L | CUAAUAAAGUGCUUGAGGA | NM_003335 |
| 1672 | UBE1L | GCAGGUGUCUUGAGCCCUA | NM_003335 |
| 1673 | UBE1L | GAAUUGAGGGAAUGGUUGA | NM_003335 |
| 1674 | UBE1L | CCUGGAGAUUGGAGACACA | NM_003335 |
| 1675 | UBE1L | GCGAAUUGUGGGCCAGAUU | NM_003335 |
| 1676 | UBE1L | CUACAGUAUUCAUGCCACA | NM_003335 |
| 1677 | UBE1L | AUGGAGACUUGGUGACUUU | NM_003335 |
| 1678 | UBE1L | CCAUGUGGACUUUGUGGUA | NM_003335 |
| 1679 | UBE1L | CACAGUAGGCACUCAAUAA | NM_003335 |
| 1680 | UBE2A | AUGCCAAGUUUCAGAAUUA | NM_003336 |
| 1681 | UBE2A | CUAAAGGAGUACAGCAAUU | NM_003336 |
| 1682 | UBE2A | GGAAUAUGGCCUACAGAGA | NM_003336 |
| 1683 | UBE2A | GCAGAGGAAUGGAAACAAU | NM_003336 |
| 1684 | UBE2A | GAACAAACGGGAAUAUGAA | NM_003336 |
| 1685 | UBE2A | GGAAGGGAGCAUAGCAUAU | NM_003336 |
| 1686 | UBE2A | GCAAGAAGGAGAAAGUUGA | NM_003336 |
| 1687 | UBE2A | GUUGAAGGACUCAGCUAAA | NM_003336 |
| 1688 | UBE2A | CAGGAGAACAAACGGGAAU | NM_003336 |
| 1689 | UBE2A | GAGCAGAGGAAUGGAAACA | NM_003336 |
| 1690 | UBE2A | CUAUGCAGAUGGUAGUAUA | NM_003336 |
| 1691 | UBE2A | GGGAGCAGAGGAAUGGAAA | NM_003336 |
| 1692 | UBE2A | AAUAUGGCCUACAGAGAAU | NM_003336 |
| 1693 | UBE2A | AAUGAUUGCUGAAGUGUUU | NM_003336 |
| 1694 | UBE2A | ACAAGUAACCCAUGUAAAA | NM_003336 |
| 1695 | UBE2A | GAAUAUGGCCUACAGAGAA | NM_003336 |
| 1696 | UBE2A | CAGCAAUUGUAGUAACUGA | NM_003336 |
| 1697 | UBE2A | GUGAAUGUGUUUGGAAUAU | NM_003336 |
| 1698 | UBE2A | GCAUAUCUGUGGCAAACUA | NM_003336 |
| 1699 | UBE2A | GGAUGGAACAUUUAAACUU | NM_003336 |
| 1700 | UBE2A | GAGAAUAGAAACAAAUCCA | NM_003336 |
| 1701 | UBE2A | AAUAAACCACCUACAGUUA | NM_003336 |
| 1702 | UBE2A | AGAACAAACGGGAAUAUGA | NM_003336 |
| 1703 | UBE2A | AGCUGUACCAGGAGAACAA | NM_003336 |
| 1704 | UBE2A | ACUCAAUUGUCCAUCUUUA | NM_003336 |
| 1705 | UBE2A | AGUUAUUGCUGCAUGCUUU | NM_003336 |
| 1706 | UBE2A | GCACAAGUAACCCAUGUAA | NM_003336 |
| 1707 | UBE2A | CAAGAAGGAGAAAGUUGAA | NM_003336 |
| 1708 | UBE2A | UCACUGAAGAAUAUCCAAA | NM_003336 |
| 1709 | UBE2A | GAUACUAAGAUCUCAGUCA | NM_003336 |
| 1710 | UBE2B | GAACAAAGCUGGAAUGAUU | NM_003337 |
| 1711 | UBE2B | AUACAUAACUUCAGUGCAA | NM_003337 |
| 1712 | UBE2B | CAAACGAGAAUAUGAGAAA | NM_003337 |
| 1713 | UBE2B | AGGCUGAGGUGGCAGAAUA | NM_003337 |
| 1714 | UBE2B | GGAGGGAAAUCUUGGUGUA | NM_003337 |
| 1715 | UBE2B | CAAGAGACUUUGUCACUUA | NM_003337 |
| 1716 | UBE2B | GGAAAACAAACGAGAAUAU | NM_003337 |
| 1717 | UBE2B | CAUCUUAGUUUACUGGAUA | NM_003337 |
| 1718 | UBE2B | GGCAAAGGCGGGAGGAUCA | NM_003337 |
| 1719 | UBE2B | GCUUGUGUAUCUUGAUUAA | NM_003337 |
| 1720 | UBE2B | AGACAUAACUGGUUUGACU | NM_003337 |
| 1721 | UBE2B | GGUAGCAUAUGUUUAGAUA | NM_003337 |
| 1722 | UBE2B | AGUUAUAUUUGGACCAGAA | NM_003337 |
| 1723 | UBE2B | GCACAGCUUUAUCAGGAAA | NM_003337 |
| 1724 | UBE2B | GCAGUGGAAUGCAGUUAUA | NM_003337 |
| 1725 | UBE2B | GUAUUUAGGCCAUUUGUUA | NM_003337 |
| 1726 | UBE2B | CAGGAAAACAAACGAGAAU | NM_003337 |
| 1727 | UBE2B | ACACAGAGAACACAAAUUU | NM_003337 |
| 1728 | UBE2B | ACAACAUCAUGCAGUGGAA | NM_003337 |
| 1729 | UBE2B | GCACAUAUUGGAGGGAAAU | NM_003337 |
| 1730 | UBE2B | GUUUAGAUAUCCUUCAGAA | NM_003337 |
| 1731 | UBE2B | UAUCCUAUGCCUUCAAAUA | NM_003337 |
| 1732 | UBE2B | GAGGGAAAUCUUGGUGUAA | NM_003337 |
| 1733 | UBE2B | GAGUAAUUCUAGACAUAAC | NM_003337 |
| 1734 | UBE2B | GAGCUGUGAUUAUGCCAUU | NM_003337 |
| 1735 | UBE2B | GCACUUGCCUGUAGUCUCA | NM_003337 |
| 1736 | UBE2B | GGGAGACGGGAUAGUGUUU | NM_003337 |
| 1737 | UBE2B | ACUAAGUUAUUGCUGCAUA | NM_003337 |
| 1738 | UBE2B | ACAAACGAGAAUAUGAGAA | NM_003337 |
| 1739 | UBE2B | AGCAAUACCCUGUCUUUAA | NM_003337 |
| 1740 | UBE2C | GGUAUAAGCUCUCGCUAGA | NM_007019 |
| 1741 | UBE2C | AAGAAGUACCUGCAAGAAA | NM_007019 |
| 1742 | UBE2C | CGGUUGAGCCCUUGUAUAU | NM_007019 |
| 1743 | UBE2C | CCACAGCUUUUAAGAAGUA | NM_007019 |
| 1744 | UBE2C | CCAUGGAGCAGCUGGAACA | NM_007019 |
| 1745 | UBE2C | GGAGAACCCAACAUUGAUA | NM_007019 |
| 1746 | UBE2C | GUAUAGGACUCUUUAUCUU | NM_007019 |
| 1747 | UBE2C | CUGGAACAGUAUAUGAAGA | NM_007019 |
| 1748 | UBE2C | UGGAGCAGCUGGAACAGUA | NM_007019 |
| 1749 | UBE2C | UAAAUUAAGCCUCGGUUGA | NM_007019 |
| 1750 | UBE2C | AGAAGUACCUGCAAGAAAC | NM_007019 |
| 1751 | UBE2C | UUAAGAAGUACCUGCAAGA | NM_007019 |
| 1752 | UBE2C | UAUCUUGAGCUGUGGUAUU | NM_007019 |
| 1753 | UBE2C | GUUGAGCCCUUGUAUAUUA | NM_007019 |
| 1754 | UBE2C | UGCAAGAAACCUACUCAAA | NM_007019 |
| 1755 | UBE2C | CAGACAACCUUUUCAAAUG | NM_007019 |
| 1756 | UBE2C | UAGGAGAACCCAACAUUGA | NM_007019 |
| 1757 | UBE2C | CAAGAAACCUACUCAAAGC | NM_181799 |
| 1758 | UBE2C | CAGCUGGAACAGUAUAUGA | NM_007019 |
| 1759 | UBE2C | GCAAGAAACCUACUCAAAG | NM_007019 |
| 1760 | UBE2C | GAGCAGCUGGAACAGUAUA | NM_007019 |
| 1761 | UBE2C | GAGCCCUUGUAUAUUAAAU | NM_007019 |
| 1762 | UBE2C | CGAGCGAGUUCCUGUCUCU | NM_007019 |
| 1763 | UBE2C | GGACCAUUCUGCUCUCCAU | NM_007019 |
| 1764 | UBE2C | GGUCUGCCCUGUAUGAUGU | NM_007019 |
| 1765 | UBE2C | UACAAUGCGCCCACAGUGA | NM_007019 |
| 1766 | UBE2C | UCUAGGAGAACCCAACAUU | NM_007019 |
| 1767 | UBE2C | UAACAUAUGCCUGGACAUC | NM_007019 |
| 1768 | UBE2C | ACAAUGCGCCCACAGUGAA | NM_007019 |
| 1769 | UBE2C | GGUUGAGCCCUUGUAUAUU | NM_007019 |
| 1770 | UBE2D1 | GAGAAUGGACUCAGAAAUA | NM_003338 |
| 1771 | UBE2D1 | CAACAGACAUGCAAGAGAA | NM_003338 |
| 1772 | UBE2D1 | GCAUUGAGAAAGACAUUUA | NM_003338 |
| 1773 | UBE2D1 | CAGAAAGAAUUGAGUGAUC | NM_003338 |
| 1774 | UBE2D1 | GGAAGUAUUUGUCUCGAUA | NM_003338 |
| 1775 | UBE2D1 | GAAAGAAUUGAGUGAUCUA | NM_003338 |
| 1776 | UBE2D1 | UUGUAUGCAUUGAGAAAGA | NM_003338 |
| 1777 | UBE2D1 | CCAUGAAACCAUUUGAUUU | NM_003338 |
| 1778 | UBE2D1 | CAGCUGGACCUGUGGGAGA | NM_003338 |
| 1779 | UBE2D1 | CAUAAACAGUAAUGGAAGU | NM_003338 |
| 1780 | UBE2D1 | AGGAAGAUGUGUAACUUUU | NM_003338 |
| 1781 | UBE2D1 | CUAAGUAGGAAGAUGUGUA | NM_003338 |
| 1782 | UBE2D1 | UGAAUUAAUUGCACUGCUA | NM_003338 |
| 1783 | UBE2D1 | AGGAUAUUCUGUAGAUUGA | NM_003338 |
| 1784 | UBE2D1 | GUAGAUUGAUUGCAGAUUU | NM_003338 |
| 1785 | UBE2D1 | CUGAAAAGCAACCAAAUUA | NM_003338 |
| 1786 | UBE2D1 | AAGAGAAUGGACUCAGAAA | NM_003338 |
| 1787 | UBE2D1 | GCAAGAGAAUGGACUCAGA | NM_003338 |
| 1788 | UBE2D1 | GCACAAAUCUAUAAAUCAG | NM_003338 |
| 1789 | UBE2D1 | CAUCCAAACAUAAACAGUA | NM_003338 |
| 1790 | UBE2D1 | AGAGAAUGGACUCAGAAAU | NM_003338 |
| 1791 | UBE2D1 | AGUACCAGAUAUUGCACAA | NM_003338 |
| 1792 | UBE2D1 | CCAUGGCGCUGAAGAGGAU | NM_003338 |
| 1793 | UBE2D1 | GGAAGAUGUGUAACUUUUA | NM_003338 |
| 1794 | UBE2D1 | CAACAUUAGCAGUAAAUUG | NM_003338 |
| 1795 | UBE2D1 | UGUCUAAGAUGUCAGUUUU | NM_003338 |
| 1796 | UBE2D1 | CCCAACGGCUGAUAAUUAA | NM_003338 |
| 1797 | UBE2D1 | GAUCUACAAUGCAGCUGAA | NM_003338 |
| 1798 | UBE2D1 | GAAAUGAUCUUUACACUGU | NM_003338 |
| 1799 | UBE2D1 | CAAUGCAGCUGAAAAGCAA | NM_003338 |
| 1800 | UBE2D2 | UGGAUAACCUCUACAAAUA | NM_003339 |
| 1801 | UBE2D2 | GGGAAUGGACUCAGAAGUA | NM_003339 |
| 1802 | UBE2D2 | CAGCAUUUGUCUUGAUAUU | NM_003339 |
| 1803 | UBE2D2 | GAGAAAAGUACAACAGAAU | NM_003339 |
| 1804 | UBE2D2 | CUAUCAGGGUGGAGUAUUU | NM_003339 |
| 1805 | UBE2D2 | CAACAGAAUAGCUCGGGAA | NM_003339 |
| 1806 | UBE2D2 | AGAGAAUCCACAAGGAAUU | NM_003339 |
| 1807 | UBE2D2 | CUACAAAACAGAUAGAGAA | NM_003339 |
| 1808 | UBE2D2 | GAAGAGAAUCCACAAGGAA | NM_003339 |
| 1809 | UBE2D2 | AGAGAAAAGUACAACAGAA | NM_003339 |
| 1810 | UBE2D2 | AGAAGUAUGCGAUGUAAUU | NM_003339 |
| 1811 | UBE2D2 | GGAUAACCUCUACAAAUAA | NM_003339 |
| 1812 | UBE2D2 | AAGAGAAUCCACAAGGAAU | NM_003339 |
| 1813 | UBE2D2 | CAAAACAGAUAGAGAAAAG | NM_003339 |
| 1814 | UBE2D2 | GGAAUGGACUCAGAAGUAU | NM_003339 |
| 1815 | UBE2D2 | CUACAAUAAUGGGGCCAAA | NM_003339 |
| 1816 | UBE2D2 | GGAGAUGAUAUGUUCCAUU | NM_003339 |
| 1817 | UBE2D2 | CAAAAGUACUCUUGUCCAU | NM_003339 |
| 1818 | UBE2D2 | ACAAGGAAUUGAAUGAUCU | NM_003339 |
| 1819 | UBE2D2 | UGAAGAGAAUCCACAAGGA | NM_003339 |
| 1820 | UBE2D2 | UUGGAUAACCUCUACAAAU | NM_003339 |
| 1821 | UBE2D2 | CAGAAUAGCUCGGGAAUGG | NM_181838 |
| 1822 | UBE2D2 | GAAAAGUACAACAGAAUAG | NM_003339 |
| 1823 | UBE2D2 | GCUCGGGAAUGGACUCAGA | NM_003339 |
| 1824 | UBE2D2 | CAAUCCAGAUGAUCCUUUA | NM_003339 |
| 1825 | UBE2D2 | GCAUUUGUCUUGAUAUUCU | NM_003339 |
| 1826 | UBE2D2 | GAAGUAUGCGAUGUAAUUA | NM_003339 |
| 1827 | UBE2D2 | CACAAGGAAUUGAAUGAUC | NM_003339 |
| 1828 | UBE2D2 | CAGCACUAACUAUUUCAAA | NM_003339 |
| 1829 | UBE2D2 | GGCAGCAUUUGUCUUGAUA | NM_003339 |
| 1830 | UBE2D3 | UGGCAGAGCUGGUGUGAGA | NM_003340 |
| 1831 | UBE2D3 | GCUCUAACAUGCUGAAGAA | NM_003340 |
| 1832 | UBE2D3 | GAGCAUACACCGAGAGAGU | NM_003340 |
| 1833 | UBE2D3 | GCUUGGAGCUAUUAGUUAA | NM_003340 |
| 1834 | UBE2D3 | GGAAAUUGGAAGUCAAACA | NM_003340 |
| 1835 | UBE2D3 | AGAGAUAAGUACAACAGAA | NM_003340 |
| 1836 | UBE2D3 | GAGAUAAGUACAACAGAAU | NM_003340 |
| 1837 | UBE2D3 | GCGCUGAAACGGAUUAAUA | NM_003340 |
| 1838 | UBE2D3 | GAACAGAAAAUGUGAUGUA | NM_003340 |
| 1839 | UBE2D3 | GCAUACACCGAGAGAGUGA | NM_003340 |
| 1840 | UBE2D3 | GUGAGGAGCCAGACGACAA | NM_003340 |
| 1841 | UBE2D3 | AAAUGGAGCAUGUGUAUUA | NM_003340 |
| 1842 | UBE2D3 | CCGGGAUAAUCAAGAGUUU | NM_003340 |
| 1843 | UBE2D3 | CUGAAUAAAUGAUGCAAGU | NM_003340 |
| 1844 | UBE2D3 | CAACAGAAUAUCUCGGGAA | NM_181887 |
| 1845 | UBE2D3 | GAUGAGUGAUCAACUAAUA | NM_003340 |
| 1846 | UBE2D3 | GAUUUGAGGUUACAUGAUA | NM_003340 |
| 1847 | UBE2D3 | CAGCAUUUGUCUCGAUAUU | NM_003340 |
| 1848 | UBE2D3 | GAGAAUGGAAAUUGGAAGU | NM_003340 |
| 1849 | UBE2D3 | AUCAAAGGAUACAGCAUUA | NM_003340 |
| 1850 | UBE2D3 | GAAACGGAUUAAUAAGGAA | NM_003340 |
| 1851 | UBE2D3 | GCAAGUUGUCAAUGGAUGA | NM_003340 |
| 1852 | UBE2D3 | UGUUAGAGAUUUGAGGUUA | NM_003340 |
| 1853 | UBE2D3 | CAGACAGAGAUAAGUACAA | NM_181886 |
| 1854 | UBE2D3 | AAACAGACAGAGAUAAGUA | NM_003340 |
| 1855 | UBE2D3 | GGUUACAUGAUAUGCUUUA | NM_003340 |
| 1856 | UBE2D3 | CAUCAAAGGAUACAGCAUU | NM_003340 |
| 1857 | UBE2D3 | CUAACAUGCUGAAGAAAUC | NM_003340 |
| 1858 | UBE2D3 | UGAUAUGUUUCAUUGGCAA | NM_181888 |
| 1859 | UBE2E1 | CCAAGAAGAAGGAGAGUAA | NM_003341 |
| 1860 | UBE2E1 | GAGCAAACCGAGAAAGAAA | NM_182666 |
| 1861 | UBE2E1 | GUGAAAACCUGUAGUGAAA | NM_003341 |
| 1862 | UBE2E1 | GAGCAGAACAUGACAGAAU | NM_182666 |
| 1863 | UBE2E1 | GGUUCUAUGUUGUGGACUA | NM_003341 |
| 1864 | UBE2E1 | UGUCAUUAGUUCUGCAAUA | NM_003341 |
| 1865 | UBE2E1 | CGGAGGAGCCAGACACAAA | NM_003341 |
| 1866 | UBE2E1 | AGAGAUGAGUAGUGCGUUU | NM_003341 |
| 1867 | UBE2E1 | GGUAAAGAGUAGGGUAUUU | NM_003341 |
| 1868 | UBE2E1 | GCUUGGACAUAUUGAAAGA | NM_003341 |
| 1869 | UBE2E1 | AGAAGGAGCUGGCGGACAU | NM_003341 |
| 1870 | UBE2E1 | GACAGUGGACCAAGAGAUA | NM_003341 |
| 1871 | UBE2E1 | GGAAGGGAACAUUGAUAUU | NM_003341 |
| 1872 | UBE2E1 | CCAUAUAAGAGAUGAGUAG | NM_003341 |
| 1873 | UBE2E1 | GCUUGUAGUCUGUAAAUUU | NM_003341 |
| 1874 | UBE2E1 | UGAAAUACCUUAAGCUGUU | NM_003341 |
| 1875 | UBE2E1 | UGAAUCAGGACUUGUGAAA | NM_003341 |
| 1876 | UBE2E1 | CCAAGAGAAUUCAGAAGGA | NM_003341 |
| 1877 | UBE2E1 | GAGGGUGGGAGUUGGUAAA | NM_003341 |
| 1878 | UBE2E1 | AAACCGAGAAAGAAACAAA | NM_003341 |
| 1879 | UBE2E1 | GUAAAGUCAGCAUGAGCAA | NM_003341 |
| 1880 | UBE2E1 | GAAAACCUGUAGUGAAAUA | NM_003341 |
| 1881 | UBE2E1 | GAGAUACGCUACAUAAAUU | NM_003341 |
| 1882 | UBE2E1 | GGGAGUUGGUAAAGAGUAG | NM_003341 |
| 1883 | UBE2E1 | GAAGAGAGCUGCUUAUGAU | NM_003341 |
| 1884 | UBE2E1 | GAGUAGGGUAUUUCUAUAA | NM_003341 |
| 1885 | UBE2E1 | CAACCAGCAAACCGAGAAA | NM_003341 |
| 1886 | UBE2E1 | GAGAGUAAAGUCAGCAUGA | NM_003341 |
| 1887 | UBE2E1 | AAGAAGGAGAGUAAAGUCA | NM_182666 |
| 1888 | UBE2E1 | CAAGAGAUACGCUACAUAA | NM_182666 |
| 1889 | UBE2E3 | AAGAACAAGAGGAAAGAAA | NM_006357 |
| 1890 | UBE2E3 | AUAUGAAGGUGGUGUGUUU | NM_006357 |
| 1891 | UBE2E3 | GAGCAGAACACGACAGGAU | NM_006357 |
| 1892 | UBE2E3 | ACCAAGAUGUCCAGUGAUA | NM_006357 |
| 1893 | UBE2E3 | AGAAGGAGCUAGCUGAAAU | NM_006357 |
| 1894 | UBE2E3 | GGUAAAUGCUAUCAAGAGU | NM_006357 |
| 1895 | UBE2E3 | AGAGAUAACUUCACCAAGA | NM_006357 |
| 1896 | UBE2E3 | CUGAAGAACAAGAGGAAAG | NM_182678 |
| 1897 | UBE2E3 | AAGCAUAGCCACUCAGUAU | NM_006357 |
| 1898 | UBE2E3 | ACACCAAACUCUCUAGCAA | NM_006357 |
| 1899 | UBE2E3 | UGUAUUAAACCCAGAUCUA | NM_006357 |
| 1900 | UBE2E3 | GCCUGAAGAACAAGAGGAA | NM_182678 |
| 1901 | UBE2E3 | CAAGAGAUACGCAACAUAA | NM_006357 |
| 1902 | UBE2E3 | CAAUAAACAUGCUCCUGAA | NM_006357 |
| 1903 | UBE2E3 | GAAGGAGCUAGCUGAAAUA | NM_006357 |
| 1904 | UBE2E3 | GCUAUCAAGAGUAGAACUU | NM_006357 |
| 1905 | UBE2E3 | GGCAAAGGUCCGAUGAUGA | NM_006357 |
| 1906 | UBE2E3 | GCAAAUCUUUAUAGCCUUU | NM_006357 |
| 1907 | UBE2E3 | CCUAAAGGAGAUAACAUUU | NM_006357 |
| 1908 | UBE2E3 | CUCCAGAGCCUGAAGAACA | NM_006357 |
| 1909 | UBE2E3 | CCAAGAGAUACGCAACAUA | NM_006357 |
| 1910 | UBE2E3 | GCCUAAAGGAGAUAACAUU | NM_006357 |
| 1911 | UBE2E3 | UGAAAUAACCCUUGAUCCU | NM_006357 |
| 1912 | UBE2E3 | GUAAAUGCUAUCAAGAGUA | NM_006357 |
| 1913 | UBE2E3 | AGAACAAGAGGAAAGAAAA | NM_182678 |
| 1914 | UBE2E3 | CACCAAACUCUCUAGCAAA | NM_006357 |
| 1915 | UBE2E3 | GCAGUGUGAAGGAGCAGAA | NM_006357 |
| 1916 | UBE2E3 | ACUCAGUAUUUGACCAACA | NM_006357 |
| 1917 | UBE2G1 | GAGAAGUGGUUUAGGAAAA | NM_003342 |
| 1918 | UBE2G1 | GGAUAGAACUUGAGACAGU | NM_003342 |
| 1919 | UBE2G1 | GGAAGUAGUCUUUGGCUUA | NM_003342 |
| 1920 | UBE2G1 | GGGAAGAUAAGUAUGGUUA | NM_003342 |
| 1921 | UBE2G1 | ACAAAGAAAUUGCGAUGUA | NM_003342 |
| 1922 | UBE2G1 | CUACUUAACUUCUGGGUUU | NM_003342 |
| 1923 | UBE2G1 | GCACCCAAAUGUUGAUAAA | NM_003342 |
| 1924 | UBE2G1 | GGAAGAUAGAAAUGGAGAA | NM_003342 |
| 1925 | UBE2G1 | GGGUAAAUGCUUUGCUAUU | NM_003342 |
| 1926 | UBE2G1 | GGUGUUUGAUUGUGAGAAU | NM_003342 |
| 1927 | UBE2G1 | GAUUAAUGUUUGAGCUUCA | NM_003342 |
| 1928 | UBE2G1 | GUAUAGAUCCCGUCACUAA | NM_003342 |
| 1929 | UBE2G1 | CAAUAAAACAUGCCAGUUA | NM_003342 |
| 1930 | UBE2G1 | GAGAAAUGCUUUGGCAGAA | NM_003342 |
| 1931 | UBE2G1 | GUGGAAACCAUCAUGAUUA | NM_003342 |
| 1932 | UBE2G1 | GAAGAUAGAAAUGGAGAAU | NM_003342 |
| 1933 | UBE2G1 | GGAACUGGGCUGCAAUAAA | NM_003342 |
| 1934 | UBE2G1 | GCAGAAGAGUGAAAGAACU | NM_003342 |
| 1935 | UBE2G1 | UAAUGUUGAUGCUGCGAAA | NM_003342 |
| 1936 | UBE2G1 | UCAUGUACAUCCACAAAUA | NM_003342 |
| 1937 | UBE2G1 | GGGAAGAUAGAAAUGGAGA | NM_003342 |
| 1938 | UBE2G1 | GUACAUAGCACAACAUGAU | NM_003342 |
| 1939 | UBE2G1 | AGAGACUGCUUUUGAGUGA | NM_003342 |
| 1940 | UBE2G1 | GCUAGUAACUUCACUUAUU | NM_003342 |
| 1941 | UBE2G1 | GCACAACAUGAUCCGGAUA | NM_003342 |
| 1942 | UBE2G1 | AUGCACAGCUACAGGCUUU | NM_003342 |
| 1943 | UBE2G1 | GUUGAUUCCUUAUGCAAAU | NM_003342 |
| 1944 | UBE2G1 | GCUACAGGCUUUCUACUUA | NM_003342 |
| 1945 | UBE2G1 | AAUGGAGGGAAGAUAGAAA | NM_003342 |
| 1946 | UBE2G1 | CCAGAGAAGUGGUUUAGGA | NM_003342 |
| 1947 | UBE2G2 | ACAAAGGGCUUCAGGUAGA | NM_003343 |
| 1948 | UBE2G2 | GAUCACAAGGUCAGGAAAU | NM_003343 |
| 1949 | UBE2G2 | CCAUGAAUGAAGAGAACUU | NM_003343 |
| 1950 | UBE2G2 | UCACAAAGGGCUUCAGGUA | NM_003343 |
| 1951 | UBE2G2 | GAAAUGGGGUAAAUAGAAA | NM_003343 |
| 1952 | UBE2G2 | GCUCUGUGCUGGUACCAAA | NM_003343 |
| 1953 | UBE2G2 | UGACGAAAGUGGAGCUAAC | NM_003343 |
| 1954 | UBE2G2 | UUACAAACCAUCACACUUA | NM_003343 |
| 1955 | UBE2G2 | GGCCAAGGCAGGUAGAUCA | NM_003343 |
| 1956 | UBE2G2 | UUACAGUAUUCCUCACAAA | NM_003343 |
| 1957 | UBE2G2 | CCAAGCAGAUCGUCCAGAA | NM_003343 |
| 1958 | UBE2G2 | GAGAUUUACCUGUGAGAUG | NM_003343 |
| 1959 | UBE2G2 | GGCAGAUGCUUUUCUUAUA | NM_003343 |
| 1960 | UBE2G2 | GGGAGCAGUUCUAUAAGAU | NM_003343 |
| 1961 | UBE2G2 | GCAGAUGCUUUUCUUAUAA | NM_003343 |
| 1962 | UBE2G2 | GCGAUGACCCCAUGGGCUA | NM_182688 |
| 1963 | UBE2G2 | ACAGCUUACUGCAGUUUUA | NM_003343 |
| 1964 | UBE2G2 | GUCAGGAAAUUGAGACCAU | NM_003343 |
| 1965 | UBE2G2 | CAAGGCAGGUAGAUCACAA | NM_003343 |
| 1966 | UBE2G2 | UGGCAGAGCCCAAUGACGA | NM_182688 |
| 1967 | UBE2G2 | GCGAUGACCGGGAGCAGUU | NM_003343 |
| 1968 | UBE2G2 | CCACUUGAUUACCCGUUAA | NM_182688 |
| 1969 | UBE2G2 | GGCAACAGAGCGAGACUCA | NM_003343 |
| 1970 | UBE2G2 | GAUCAUGGGCCCAGAAGAC | NM_182688 |
| 1971 | UBE2G2 | GAGCAGUUCUAUAAGAUUG | NM_003343 |
| 1972 | UBE2G2 | ACCAUCACACUUAGAAAUA | NM_003343 |
| 1973 | UBE2G2 | CAACAGAGCGAGACUCAGU | NM_003343 |
| 1974 | UBE2G2 | CAUCACACUUAGAAAUACU | NM_003343 |
| 1975 | UBE2G2 | GGUUGUACCUGCCAGACUU | NM_003343 |
| 1976 | UBE2G2 | GGAGCAGUUCUAUAAGAUU | NM_182688 |
| 1977 | UBE2H | GGAAAUAGCCGCUCUGAUA | NM_003344 |
| 1978 | UBE2H | AAGAGUACAUCCAGAAAUA | NM_003344 |
| 1979 | UBE2H | GGACAGCACAGGAGGAGAA | NM_003344 |
| 1980 | UBE2H | GAUAGGUAGAUGUGAGUAA | NM_003344 |
| 1981 | UBE2H | CAGAAGAAUACAAGCAGAA | NM_003344 |
| 1982 | UBE2H | GGGAGGACUUAAUGAAUUU | NM_003344 |
| 1983 | UBE2H | CGGAGGAGGCGCUGAAAGA | NM_003344 |
| 1984 | UBE2H | CAUGAGAAGCAGACUAUAA | NM_003344 |
| 1985 | UBE2H | GGCAAGAGGCGGAUGGACA | NM_003344 |
| 1986 | UBE2H | AAGAUGAGGCCCAGGAUAU | NM_003344 |
| 1987 | UBE2H | ACUGAACUGUCGAAGGAAA | NM_003344 |
| 1988 | UBE2H | UUAGAAAGGUUGCAGAUUU | NM_003344 |
| 1989 | UBE2H | GGGAGCUAAUUAAGAGUAU | NM_003344 |
| 1990 | UBE2H | UCAAGCUCAUCGAGAGUAA | NM_003344 |
| 1991 | UBE2H | GUAUAAAGCAGGGAGCUAA | NM_003344 |
| 1992 | UBE2H | AUAUGGAGUUGUAGUAGAA | NM_003344 |
| 1993 | UBE2H | GCAGAAAAUUAAAGAGUAC | NM_003344 |
| 1994 | UBE2H | CCAGAAGAAUACAAGCAGA | NM_003344 |
| 1995 | UBE2H | GAAGAUGAGGCCCAGGAUA | NM_003344 |
| 1996 | UBE2H | CCAAUAUAUUUGAGUCCUU | NM_182697 |
| 1997 | UBE2H | CGCUGAAAGAACAGGAAGA | NM_003344 |
| 1998 | UBE2H | GAUAUGGAGUUGUAGUAGA | NM_003344 |
| 1999 | UBE2H | GAGAAGCAGACUAUAAUAU | NM_003344 |
| 2000 | UBE2H | GAAGAAUACAAGCAGAAAA | NM_182697 |
| 2001 | UBE2H | GAGAGUAAACAUGAGGUUA | NM_003344 |
| 2002 | UBE2H | CUACUGAACUGUCGAAGGA | NM_003344 |
| 2003 | UBE2H | GAGUGGACCUACCUGAUAA | NM_182697 |
| 2004 | UBE2H | UGGGAGGACUUAAUGAAUU | NM_182697 |
| 2005 | UBE2H | AGAAAUACGCCACGGAGGA | NM_182697 |
| 2006 | UBE2H | AGUUAUUGGCCUAUCCUAA | NM_003344 |
| 2007 | UBE2I | GAGGAAAGCAUGGAGGAAA | NM_003345 |
| 2008 | UBE21 | GGGAAGGAGGCUUGUUUAA | NM_003345 |
| 2009 | UBE21 | CCAUCUUAGAGGAGGACAA | NM_194260 |
| 2010 | UBE2I | GAAAAGGGUCCGAGCACAA | NM_003345 |
| 2011 | UBE2I | GAGCACAAGCCAAGAAGUU | NM_003345 |
| 2012 | UBE2I | AGGAAAGCAUGGAGGAAAG | NM_003345 |
| 2013 | UBE2I | GGAGGAACGUGUGGAGUUU | NM_003345 |
| 2014 | UBE2I | AAUCUAAAGUUGCUCCAUA | NM_003345 |
| 2015 | UBE2I | CAGCUCAAGCAGAGGCCUA | NM_003345 |
| 2016 | UBE2I | GAAUACAGGAACUUCUAAA | NM_003345 |
| 2017 | UBE2I | CAGAGUGGAGUACGAGAAA | NM_003345 |
| 2018 | UBE2I | GCAGAGGCCUACACGAUUU | NM_003345 |
| 2019 | UBE2I | GGGCCUGUGUCUUGGACUU | NM_003345 |
| 2020 | UBE2I | ACAGGAACUUCUAAAUGAA | NM_003345 |
| 2021 | UBE2I | GGAUCUGUGUUUGGUGAAA | NM_003345 |
| 2022 | UBE2I | AGAGGAAAGCAUGGAGGAA | NM_003345 |
| 2023 | UBE2I | CUGUGUUGCUGUUUAGGUA | NM_003345 |
| 2024 | UBE2I | GAGGAAAGACCACCCAUUU | NM_003345 |
| 2025 | UBE2I | GGAAGGAGGCUUGUUUAAA | NM_003345 |
| 2026 | UBE2I | UAAAGUUGCUCCAUACAAU | NM_003345 |
| 2027 | UBE2I | AGAAGGAAGGGAUUGGUUU | NM_003345 |
| 2028 | UBE2I | GGGAUUGGUUUGGCAAGAA | NM_003345 |
| 2029 | UBE2I | UGGAGGAACGUGUGGAGUU | NM_003345 |
| 2030 | UBE2I | ACAGAGUGGAGUACGAGAA | NM_194259 |
| 2031 | UBE2I | GCCAAAACAGAGUGGAGUA | NM_194259 |
| 2032 | UBE2I | GCCCAGGAGAGGAAAGCAU | NM_194259 |
| 2033 | UBE2I | GGAGGAAAGACCACCCAUU | NM_194260 |
| 2034 | UBE2I | AAGCAGAGGCCUACACGAU | NM_003345 |
| 2035 | UBE2I | GAGAGGAAAGCAUGGAGGA | NM_194259 |
| 2036 | UBE2I | UAUCCAAGACCCAGCUCAA | NM_194259 |
| 2037 | UBE2J1 | UGUAGAAUGUAUAGGGAUA | NM_016021 |
| 2038 | UBE2J1 | GAGUAUAAGGACAGCAUUA | NM_016336 |
| 2039 | UBE2J1 | AAGAAGAGCACUUGCCAAA | NM_016336 |
| 2040 | UBE2J1 | GCAAAUAAGCUUUAAGGCA | NM_016021 |
| 2041 | UBE2J1 | GCUUUAAGGCAGAAGUCAA | NM_016021 |
| 2042 | UBE2J1 | CAGCCUUCGUGGAGUAUAA | NM_016021 |
| 2043 | UBE2J1 | UGAAAGAAGCGGCAGAAUU | NM_016021 |
| 2044 | UBE2J1 | CCAAAGAACUGGCUAGGCA | NM_016021 |
| 2045 | UBE2J1 | GAAUAUAUCUGGCAAACGA | NM_016021 |
| 2046 | UBE2J1 | GAGAAUUACUAGUUACUCA | NM_016336 |
| 2047 | UBE2J1 | GGGUAUAAUCUAAGAAUUG | NM_016336 |
| 2048 | UBE2J1 | GUAUAGGGAUAGAAGAGUU | NM_016021 |
| 2049 | UBE2J1 | CGACGAAUAUAUCUGGCAA | NM_016021 |
| 2050 | UBE2J1 | AAAUAAGCUUUAAGGCAGA | NM_016021 |
| 2051 | UBE2J1 | UAGGAGAUGUACUGGAAUU | NM_016021 |
| 2052 | UBE2J1 | CUAUAUUGCCCUUUGAAAU | NM_016336 |
| 2053 | UBE2J1 | CAGAGAAGGUUGUCUACUU | NM_016021 |
| 2054 | UBE2J1 | CAGCAGAGUCAGAGAAGGU | NM_016021 |
| 2055 | UBE2J1 | CAUAGGAGAUGUACUGGAA | NM_016021 |
| 2056 | UBE2J1 | CCUAAACAUUCUUCAGUGA | NM_016021 |
| 2057 | UBE2J1 | AAGCAAAACUCCUCAAGUA | NM_016021 |
| 2058 | UBE2J1 | GUCAAACAUUUAUGAGGAA | NM_016021 |
| 2059 | UBE2J1 | GAAUGGCACUUCACGGUUA | NM_016336 |
| 2060 | UBE2J1 | AGUCAGAGAAGGUUGUCUA | NM_016021 |
| 2061 | UBE2J1 | CCAUAGGUUCUCUAGAUUA | NM_016021 |
| 2062 | UBE2J1 | GAAAGAAGCGGCAGAAUUG | NM_016021 |
| 2063 | UBE2J1 | CAAAUAAGCUUUAAGGCAG | NM_016021 |
| 2064 | UBE2J1 | GGCUAAUGGUCGAUUUGAA | NM_016021 |
| 2065 | UBE2J1 | UGGCAGCCUUCGUGGAGUA | NM_016021 |
| 2066 | UBE2J1 | GCUAAGAAUACCUCCAUGA | NM_016021 |
| 2067 | UBE2J2 | ACAGAAAGCACAAGACGAA | NM_058167 |
| 2068 | UBE2J2 | GCUCCUAGGUUUAGCUUUU | NM_058167 |
| 2069 | UBE2J2 | UCAGUGAGUUGAAAGGAAA | NM_058167 |
| 2070 | UBE2J2 | CUGAAGUCGUGGAGGAGAU | NM_194457 |
| 2071 | UBE2J2 | GUUGAAAGGAAAUGUGUUU | NM_058167 |
| 2072 | UBE2J2 | UAUUAGAUGUGGUCACUUA | NM_058167 |
| 2073 | UBE2J2 | ACAAAUGUGUUUACAGUCA | NM_058167 |
| 2074 | UBE2J2 | GUAUAGAGACGUCGGACUU | NM_058167 |
| 2075 | UBE2J2 | CCACCAGGCUCCUAGGUUU | NM_058167 |
| 2076 | UBE2J2 | GUGGAGGAGAUUAAACAAA | NM_194458 |
| 2077 | UBE2J2 | GUGCUGGAUUUGUAGCUUA | NM_058167 |
| 2078 | UBE2J2 | CGAACUUGUUUGUGAUAGU | NM_194458 |
| 2079 | UBE2J2 | AAGUCGUGGAGGAGAUUAA | NM_058167 |
| 2080 | UBE2J2 | CAGAGAAUUUCCUUUCAAA | NM_194315 |
| 2081 | UBE2J2 | GUGCAGAGUUUAGCAUUUA | NM_194457 |
| 2082 | UBE2J2 | AGUGCAGAGUUUAGCAUUU | NM_058167 |
| 2083 | UBE2J2 | GGGUUUGGUCUCAGCAUUU | NM_058167 |
| 2084 | UBE2J2 | ACGGGAGGUUUAAGUGCAA | NM_194457 |
| 2085 | UBE2J2 | UGGAGGAGAUUAAACAAAA | NM_194458 |
| 2086 | UBE2J2 | UGGCUAUUAUCAUGGAAAA | NM_058167 |
| 2087 | UBE2J2 | CACCAGGCUCCUAGGUUUA | NM_058167 |
| 2088 | UBE2J2 | UGAGCUUCAUGGUGGAGAA | NM_058167 |
| 2089 | UBE2J2 | GCACAAGACGAACUCAGUA | NM_058167 |
| 2090 | UBE2J2 | GGCCUUGUGUGCUGGAUUU | NM_058167 |
| 2091 | UBE2J2 | GUGUUUACAGUCAGAAUGA | NM_058167 |
| 2092 | UBE2J2 | UUAUGAAGGUGGCUAUUAU | NM_058167 |
| 2093 | UBE2J2 | AGACGAACUCAGUAGCAGA | NM_194315 |
| 2094 | UBE2J2 | GUGGCUAUUAUCAUGGAAA | NM_194316 |
| 2095 | UBE2J2 | CCAGAGAAUUUCCUUUCAA | NM_194315 |
| 2096 | UBE2J2 | CCCAGUAUCUAUAUGAUCA | NM_194458 |
| 2097 | UBE2L3 | CCUCAGUUCUUGUGUGAAA | NM_003347 |
| 2098 | UBE2L3 | UGAAGGAGCUUGAAGAAAU | NM_003347 |
| 2099 | UBE2L3 | UAAGAAUGCUGAAGAGUUU | NM_003347 |
| 2100 | UBE2L3 | GCUGAAGAGUUUACAAAGA | NM_003347 |
| 2101 | UBE2L3 | CCGCAAAUGUGGGAUGAAA | NM_003347 |
| 2102 | UBE2L3 | UGAUGAAUCUCGCCAGAAA | NM_003347 |
| 2103 | UBE2L3 | ACAAAGAAAUAUGGGGAAA | NM_003347 |
| 2104 | UBE2L3 | CUGAAGAGUUUACAAAGAA | NM_003347 |
| 2105 | UBE2L3 | GAAAAGUGAUGAUGGAUUU | NM_003347 |
| 2106 | UBE2L3 | CCAGAAUGUCCGUUUGAAA | NM_003347 |
| 2107 | UBE2L3 | GUGGAGAAGAUGACUUAAA | NM_003347 |
| 2108 | UBE2L3 | GAUGAAGGAGCUUGAAGAA | NM_198157 |
| 2109 | UBE2L3 | GACUAGAUCCUGUGGAGAA | NM_003347 |
| 2110 | UBE2L3 | CAGAGAAGCCCUAUAAUCA | NM_003347 |
| 2111 | UBE2L3 | GCACAGAGAAGCCCUAUAA | NM_003347 |
| 2112 | UBE2L3 | CCACCGAAGAUCACAUUUA | NM_003347 |
| 2113 | UBE2L3 | GCAGAAAAGUGAUGAUGGA | NM_003347 |
| 2114 | UBE2L3 | CCUCAUAGCACUGGUGAAU | NM_003347 |
| 2115 | UBE2L3 | GUAAGAAUGCUGAAGAGUU | NM_003347 |
| 2116 | UBE2L3 | UGACCUAGCUGAAGAAUAC | NM_003347 |
| 2117 | UBE2L3 | CCUUCAGAAUCGAAAUCAA | NM_003347 |
| 2118 | UBE2L3 | GAGAAGAUGACUUAAACUU | NM_003347 |
| 2119 | UBE2L3 | GCAGGAGGCUGAUGAAGGA | NM_003347 |
| 2120 | UBE2L3 | GCCAGUAAUUAGUGCCGAA | NM_003347 |
| 2121 | UBE2L3 | GGGCUGACCUAGCUGAAGA | NM_003347 |
| 2122 | UBE2L3 | ACCCAAACAUCGACGAAAA | NM_003347 |
| 2123 | UBE2L3 | AAGCAGGACUCUGUGGAAA | NM_003347 |
| 2124 | UBE2L3 | GCUUGAAGAAAUCCGCAAA | NM_003347 |
| 2125 | UBE2L3 | CCAGGUUGAUGAAGCUAAU | NM_003347 |
| 2126 | UBE2L3 | GGUUGAUGAAGCUAAUUUA | NM_003347 |
| 2127 | UBE2L6 | GGACGAGAACGGACAGAUU | NM_004223 |
| 2128 | UBE2L6 | GUGAAUAGACCGAAUAUCA | NM_004223 |
| 2129 | UBE2L6 | UGAAGGAGCUGGAGGAUCU | NM_004223 |
| 2130 | UBE2L6 | CCUCAGACUGUGAAGUAUA | NM_004223 |
| 2131 | UBE2L6 | GAAAGAAUGCCGAAGAGUU | NM_004223 |
| 2132 | UBE2L6 | AAACCAUGUUCUUGCUUAA | NM_004223 |
| 2133 | UBE2L6 | GAGUUUAAGUUUGCAGUUA | NM_004223 |
| 2134 | UBE2L6 | CUUCUUAGGUUGUUAGUCA | NM_004223 |
| 2135 | UBE2L6 | GGUUGUUAGUCAUUAGUUU | NM_004223 |
| 2136 | UBE2L6 | GCACUGGAUCCUCGGCAUA | NM_004223 |
| 2137 | UBE2L6 | AGUGAGAACUGGAAGCCUU | NM_004223 |
| 2138 | UBE2L6 | GAGUGUGUGUGUUGUGUAU | NM_004223 |
| 2139 | UBE2L6 | GUCACAAUCUGAAGAAUCA | NM_004223 |
| 2140 | UBE2L6 | AUCCGGAGCUGUUCAGAAA | NM_004223 |
| 2141 | UBE2L6 | UGAUGGGAAUAUACAGAUU | NM_004223 |
| 2142 | UBE2L6 | CCGGAGCUGUUCAGAAAGA | NM_004223 |
| 2143 | UBE2L6 | GCUGGUGAAUAGACCGAAU | NM_004223 |
| 2144 | UBE2L6 | GUUCAGAAAGAAUGCCGAA | NM_004223 |
| 2145 | UBE2L6 | GUUUAAGUUUGCAGUUACA | NM_004223 |
| 2146 | UBE2L6 | UCAGAAAGAAUGCCGAAGA | NM_004223 |
| 2147 | UBE2L6 | CCAAGCCACUGAUGGGAAU | NM_004223 |
| 2148 | UBE2L6 | AAAGAAUGCCGAAGAGUUC | NM_004223 |
| 2149 | UBE2L6 | GGCCUCAGACUGUGAAGUA | NM_004223 |
| 2150 | UBE2L6 | UGAUCAAAUUCACAACCAA | NM_004223 |
| 2151 | UBE2L6 | GGACCAGGCCUCAGACUGU | NM_004223 |
| 2152 | UBE2L6 | GAAACCAUGUUCUUGCUUA | NM_004223 |
| 2153 | UBE2L6 | CAUCAUCAGCAGUGAGAAC | NM_004223 |
| 2154 | UBE2L6 | GCAUGCGAGUGGUGAAGGA | NM_004223 |
| 2155 | UBE2L6 | GGAGCUGUUCAGAAAGAAU | NM_004223 |
| 2156 | UBE2L6 | GUAUAUAUCCUCCAGCAUU | NM_004223 |
| 2157 | UBE2M | ACAUUGACCUCGAGGGCAA | NM_003969 |
| 2158 | UBE2M | CAGAGGUCCUGCAGAACAA | NM_003969 |
| 2159 | UBE2M | CCGAGGACCCACUGAACAA | NM_003969 |
| 2160 | UBE2M | GGAAGUUUGUGUUCAGUUU | NM_003969 |
| 2161 | UBE2M | AGGUGAAGUGUGAGACAAU | NM_003969 |
| 2162 | UBE2M | CUACAAGAGUGGGAAGUUU | NM_003969 |
| 2163 | UBE2M | GGAUCCAGAAGGACAUAAA | NM_003969 |
| 2164 | UBE2M | GAAAUAGGGUUGGCGCAUA | NM_003969 |
| 2165 | UBE2M | CUGCCCAAGACGUGUGAUA | NM_003969 |
| 2166 | UBE2M | UUAAGGUGGGCCAGGGUUA | NM_003969 |
| 2167 | UBE2M | AGAAGAAGGAGGAGGAGUC | NM_003969 |
| 2168 | UBE2M | AGCCAGUCCUUACGAUAAA | NM_003969 |
| 2169 | UBE2M | GAUGAGGGCUUCUACAAGA | NM_003969 |
| 2170 | UBE2M | AGGACAUAAACGAGCUGAA | NM_003969 |
| 2171 | UBE2M | CAAGGUGAAGUGUGAGACA | NM_003969 |
| 2172 | UBE2M | CUGCGGAUCCAGAAGGACA | NM_003969 |
| 2173 | UBE2M | AAGCCAGUCCUUACGAUAA | NM_003969 |
| 2174 | UBE2M | GAAGCCAGUCCUUACGAUA | NM_003969 |
| 2175 | UBE2M | GAGCUGAACCUGCCCAAGA | NM_003969 |
| 2176 | UBE2M | CAGACGACCUCCUCAACUU | NM_003969 |
| 2177 | UBE2M | GCACCAAGGGCAGCAGCAA | NM_003969 |
| 2178 | UBE2M | GCCUCAACAUCCUCAGAGA | NM_003969 |
| 2179 | UBE2M | UGAAGCAGCAGAAGAAGGA | NM_003969 |
| 2180 | UBE2M | AAAUAGGGUUGGCGCAUAC | NM_003969 |
| 2181 | UBE2M | GAUAUCAGCUUCUCAGAUC | NM_003969 |
| 2182 | UBE2M | GCCCAAGACGUGUGAUAUC | NM_003969 |
| 2183 | UBE2M | UAAUUUAUGGCCUGCAGUA | NM_003969 |
| 2184 | UBE2M | GGACAUAAACGAGCUGAAC | NM_003969 |
| 2185 | UBE2M | CCACGUGCCCCUAGUUAUU | NM_003969 |
| 2186 | UBE2M | UUUAACACCAGGCUAACUA | NM_003969 |
| 2187 | UBE2N | CAACGAAGCCCAAGCCAUA | NM_003348 |
| 2188 | UBE2N | GGACACAGUCUUAGAAACA | NM_003348 |
| 2189 | UBE2N | GGCUAUAUGCCAUGAAUAA | NM_003348 |
| 2190 | UBE2N | AGACAAGUUGGGAAGAAUA | NM_003348 |
| 2191 | UBE2N | GAAGGUAGUUGUCAGGUUA | NM_003348 |
| 2192 | UBE2N | CAUCUGGAUUGUUGUGAAA | NM_003348 |
| 2193 | UBE2N | CAUCCUGGUUUAAGUAUAA | NM_003348 |
| 2194 | UBE2N | GGGAGGUAGUUUAAUUUUA | NM_003348 |
| 2195 | UBE2N | CCGAACCAGAUGAGAGCAA | NM_003348 |
| 2196 | UBE2N | CAGAUGAUCCAUUAGCAAA | NM_003348 |
| 2197 | UBE2N | GGACUAGGCUAUAUGCCAU | NM_003348 |
| 2198 | UBE2N | GUAGACAAGUUGGGAAGAA | NM_003348 |
| 2199 | UBE2N | UAUAAAGCACUGUGAAUGA | NM_003348 |
| 2200 | UBE2N | GCAUCAAAGCCGAACCAGA | NM_003348 |
| 2201 | UBE2N | CAUCAAAGCCGAACCAGAU | NM_003348 |
| 2202 | UBE2N | GGGAGGGACUUUUAAACUU | NM_003348 |
| 2203 | UBE2N | GGGAAGAAUAUGUUUAGAU | NM_003348 |
| 2204 | UBE2N | ACACAGUCUUAGAAACAUU | NM_003348 |
| 2205 | UBE2N | UCUGGAAACUUCUGUAAAU | NM_003348 |
| 2206 | UBE2N | CCAGAUGAUCCAUUAGCAA | NM_003348 |
| 2207 | UBE2N | CUAAUAACAUUGCUGUCAA | NM_003348 |
| 2208 | UBE2N | AGCCCAAGCCAUAGAAACA | NM_003348 |
| 2209 | UBE2N | CAAAUGAUGUAGCGGAGCA | NM_003348 |
| 2210 | UBE2N | CCAUCCUGGUUUAAGUAUA | NM_003348 |
| 2211 | UBE2N | GAUCUAAUUGCAUUGGUUA | NM_003348 |
| 2212 | UBE2N | GAGCAGAGGCUAGAAGUAU | NM_003348 |
| 2213 | UBE2N | UAACCAGGUCUUUAGAAUA | NM_003348 |
| 2214 | UBE2N | AUAGAAACAGCUAGAGCAU | NM_003348 |
| 2215 | UBE2N | AGAUGAUCCAUUAGCAAAU | NM_003348 |
| 2216 | UBE2N | AACCAGGUCUUUAGAAUAU | NM_003348 |
| 2217 | UBE2Q | AUGAAGGAGCUCAGGGAUA | NM_017582 |
| 2218 | UBE2Q | CAGAAGACUUAGAUCACUA | NM_017582 |
| 2219 | UBE2Q | CCAUAGAGUCAGUGAUCAU | NM_017582 |
| 2220 | UBE2Q | AUGAAAUGAAAGAGGAAGA | NM_017582 |
| 2221 | UBE2Q | CUAUGAAAUGAAAGAGGAA | NM_017582 |
| 2222 | UBE2Q | CCAGAUCCUCAAAGAGAAA | NM_017582 |
| 2223 | UBE2Q | UGGAGAGGCUGGUGGACAU | NM_017582 |
| 2224 | UBE2Q | CCUCAAAGAGAAAGAAGGA | NM_017582 |
| 2225 | UBE2Q | AAGAUGAAGAUGAGGAGAU | NM_017582 |
| 2226 | UBE2Q | GCUGGUGGACAUAAAGAAA | NM_017582 |
| 2227 | UBE2Q | AGAUGAUGGCAUUGGAAAA | NM_017582 |
| 2228 | UBE2Q | CUUAAAUGGUGCAGUGUCU | NM_017582 |
| 2229 | UBE2R2 | GGAAAUGGAGAGACAGUAA | NM_017811 |
| 2230 | UBE2R2 | CCACAACCCUGGCGGAAUA | NM_017811 |
| 2231 | UBE2R2 | CAGUAAAGGAAAAGACAAA | NM_017811 |
| 2232 | UBE2R2 | CGACAUUGAUGAUGAAGAU | NM_017811 |
| 2233 | UBE2R2 | GGAGAGACAGUAAAGGAAA | NM_017811 |
| 2234 | UBE2R2 | GGAUCGAAAGCCUGAAAUA | NM_017811 |
| 2235 | UBE2R2 | GCAUAUACUGGGUAGCAAA | NM_017811 |
| 2236 | UBE2R2 | GUGCUAAGCCUGAUGAAAU | NM_017811 |
| 2237 | UBE2R2 | AGACAAAGAAUAUGCUGAA | NM_017811 |
| 2238 | UBE2R2 | AGGAAGAUGCCGACUGUUA | NM_017811 |
| 2239 | UBE2R2 | AAGAUGAGGAGGAGGAAGA | NM_017811 |
| 2240 | UBE2R2 | CCACUAAGGCCGAAGCAGA | NM_017811 |
| 2241 | UBE2R2 | GAGAGACAGUAAAGGAAAA | NM_017811 |
| 2242 | UBE2R2 | GUUCACAAGUGCUGCAUAU | NM_017811 |
| 2243 | UBE2R2 | UCAGUUAUGUUCAGGAAAU | NM_017811 |
| 2244 | UBE2R2 | GACCUUUAAUGGAGAGAGA | NM_017811 |
| 2245 | UBE2R2 | UCUGAAAGGUGGAAUCCUA | NM_017811 |
| 2246 | UBE2R2 | AGGUUUAGCUGCUCAUUUA | NM_017811 |
| 2247 | UBE2R2 | GAUCGAAAGCCUGAAAUAA | NM_017811 |
| 2248 | UBE2R2 | CAUCAGGGACUUUGUGCUA | NM_017811 |
| 2249 | UBE2R2 | GAGUAACCCUCCACAGAAU | NM_017811 |
| 2250 | UBE2R2 | GCGGAAUACUGCAUCAAAA | NM_017811 |
| 2251 | UBE2R2 | CCUUCAGAUUCUUGACCAA | NM_017811 |
| 2252 | UBE2R2 | UUAUGAGAAUGGAGAUGUA | NM_017811 |
| 2253 | UBE2R2 | AUCGAAAGCCUGAAAUAAA | NM_017811 |
| 2254 | UBE2R2 | UCGAAAGCCUGAAAUAAAU | NM_017811 |
| 2255 | UBE2R2 | ACAGAAUGUUCACAGCAAA | NM_017811 |
| 2256 | UBE2R2 | GUGGAAUCCUACUCAGAAU | NM_017811 |
| 2257 | UBE2R2 | CCAUGAAACCAUCGUAACA | NM_017811 |
| 2258 | UBE2R2 | GCUGAAAUUAUUAGGAAAC | NM_017811 |
| 2259 | UBE2S | UGGAGAACUACGAGGAGUA | NM_014501 |
| 2260 | UBE2S | GCAUCAAGGUCUUUCCCAA | NM_014501 |
| 2261 | UBE2S | CCAAGAAGCAUGCUGGCGA | NM_014501 |
| 2262 | UBE2S | UCAACGUGCUCAAGAGGGA | NM_014501 |
| 2263 | UBE2V2 | GGAAAUAGGUGUAUGGAUA | NM_003350 |
| 2264 | UBE2V2 | GGACAAACAUACAACAAUU | NM_003350 |
| 2265 | UBE2V2 | GAUGAAAGCGUGUGGAGAA | NM_003350 |
| 2266 | UBE2V2 | CUAAUGAUGUCCAAAGAAA | NM_003350 |
| 2267 | UBE2V2 | GGAAGAACUUGAAGAAGGA | NM_003350 |
| 2268 | UBE2V2 | CAGAAUAUAUAGCCUGAAA | NM_003350 |
| 2269 | UBE2V2 | CGAAAUAGAAUUCAGGUUU | NM_003350 |
| 2270 | UBE2V2 | GUGUACUUCUUGUGAAUUA | NM_003350 |
| 2271 | UBE2V2 | AGUAGAAUGUGGACCUAAA | NM_003350 |
| 2272 | UBE2V2 | AGUUGUACUUCAAGAGCUA | NM_003350 |
| 2273 | UBE2V2 | CCUCAGAGACUGUGCCAUU | NM_003350 |
| 2274 | UBE2V2 | GAGUUAAAGUUCCUCGUAA | NM_003350 |
| 2275 | UBE2V2 | AAAGAGAGCUGCAGUUGAA | NM_003350 |
| 2276 | UBE2V2 | AGUUAAAGUUCCUCGUAAU | NM_003350 |
| 2277 | UBE2V2 | GUUCAGGAUUGUUUUGAUA | NM_003350 |
| 2278 | UBE2V2 | GCACUGUCAUUUAAACAUA | NM_003350 |
| 2279 | UBE2V2 | AGGCAUGAUUAUUGGGCCA | NM_003350 |
| 2280 | UBE2V2 | GAAAUAGGUGUAUGGAUAU | NM_003350 |
| 2281 | UBE2V2 | GUUGGAAGAACUUGAAGAA | NM_003350 |
| 2282 | UBE2V2 | GAUGAAGAUAUGACACUUA | NM_003350 |
| 2283 | UBE2V2 | AUAAAUAAUUCCAGUGGGA | NM_003350 |
| 2284 | UBE2V2 | CCAAGGACAAAUUAUGAAA | NM_003350 |
| 2285 | UBE2V2 | GCAUACCAGUGUUAGCAAA | NM_003350 |
| 2286 | UBE2V2 | AAGCUGUUCUUGUGUGUUA | NM_003350 |
| 2287 | UBE2V2 | CUGGACAUUUGUAAGAAUA | NM_003350 |
| 2288 | UBE2V2 | AGAACUUGAAGAAGGACAA | NM_003350 |
| 2289 | UBE2V2 | ACAGAAAUGGCAUGCUUUA | NM_003350 |
| 2290 | UBE2V2 | CUUACAAGGUGGACAGGCA | NM_003350 |
| 2291 | UBE2V2 | AAGCAUGUGUGUUUCUAAA | NM_003350 |
| 2292 | UBE2V2 | AGUGGAAGCAUGUGUGUUU | NM_003350 |
| 2293 | UBE3A | AGACAAAGAUGAAGAUGAA | NM_000462 |
| 2294 | UBE3A | GUAGAGAAAGAGAGGAUUA | NM_130838 |
| 2295 | UBE3A | CCUCAGAACUUUAGUAACA | NM_130838 |
| 2296 | UBE3A | UAACAGAAGAGAAGGUAUA | NM_130839 |
| 2297 | UBE3A | AAGUAGAAACAGAGAACAA | NM_000462 |
| 2298 | UBE3A | GGAAUUUGAAGGAGAACAA | NM_130839 |
| 2299 | UBE3A | GGGAGAAAUUGGAAUGUUU | NM_130839 |
| 2300 | UBE3A | GUAAUUAAAGUGAGGAGAA | NM_000462 |
| 2301 | UBE3A | GGAGAAGAAAGAAGAAACA | NM_000462 |
| 2302 | UBE3A | CAACAAAGUUAGGAAGUUU | NM_000462 |
| 2303 | UBE3A | CAAAUGAAAUGGUAGUCAA | NM_000462 |
| 2304 | UBE3A | CAAGAAAGGCGCUAGAAUU | NM_130839 |
| 2305 | UBE3A | AGCAAAAGAUGAAGACAAA | NM_000462 |
| 2306 | UBE3A | AGGCAUUGGUACAGAGCUU | NM_000462 |
| 2307 | UBE3A | GCACCAGUGUUAUUGGAAA | NM_000462 |
| 2308 | UBE3A | GGAAGAAGACUCAGAAGCA | NM_130838 |
| 2309 | UBE3A | GAAGAGAAGGUAUAUGAAA | NM_130839 |
| 2310 | UBE3A | GUUCAAGGCUUUUCGGAGA | NM_130839 |
| 2311 | UBE3A | UCAGAAGUUUGGCGAAAUA | NM_130839 |
| 2312 | UBE3A | CAGUCGAAAUCUAGUGAAU | NM_000462 |
| 2313 | UBE3A | GCGUGAAAGUGUUACAUAU | NM_000462 |
| 2314 | UBE3A | UGAAUGAGGUUCUAGAAAU | NM_000462 |
| 2315 | UBE3A | GAGAUGAUCGCUAUGGAAA | NM_000462 |
| 2316 | UBE3A | AGAUGAAGACAAAGAUGAA | NM_000462 |
| 2317 | UBE3A | GAAGAAAGAAGAAACAAGA | NM_130838 |
| 2318 | UBE3A | GGUGAUUGAUUGAUUGAUU | NM_130838 |
| 2319 | UBE3A | AUUAGGGAGUUCUGGGAAA | NM_130839 |
| 2320 | UBE3A | CAAUGAAGAAGAUGAUGAA | NM_000462 |
| 2321 | UBE3A | AAGCAAAAGAUGAAGACAA | NM_000462 |
| 2322 | UBE3A | GCUCACAGGGAGACAACAA | NM_130839 |
| 2323 | UBE3B | AAGAAAGGCUUGUGCAGAA | NM_130466 |
| 2324 | UBE3B | GUGCAAAUAUAAUGGGACA | NM_183415 |
| 2325 | UBE3B | GGAGAGAGAUUGAUGACUU | NM_130466 |
| 2326 | UBE3B | CCACAGUCCUUCAGAGUUU | NM_130466 |
| 2327 | UBE3B | CAAAGAGGAUAAUGAGAGA | NM_130466 |
| 2328 | UBE3B | AGAGAUAUCAGGAGAGAGA | NM_130466 |
| 2329 | UBE38 | GCACAGGGCUGCAGAAAAU | NM_130466 |
| 2330 | UBE3B | GGAACAAACACUAACCUAA | NM_130466 |
| 2331 | UBE3B | CCUACAUCCAUGAGAAUUA | NM_130466 |
| 2332 | UBE3B | CAGAUGGGUUCGUGAGUUU | NM_130466 |
| 2333 | UBE3B | GGAAACAUGGCAAGGAAUU | NM_130466 |
| 2334 | UBE3B | UCAGAAUCAAAGAGGAUAA | NM_130466 |
| 2335 | UBE3B | UGGAAGAGCUGGUCACUAU | NM_130466 |
| 2336 | UBE3B | GGGAGAGAGUGAUUUAUAA | NM_130466 |
| 2337 | UBE3B | GGAUGGAAUUGUAGAGAAC | NM_183414 |
| 2338 | UBE3B | GGGAUGGAAUUGUAGAGAA | NM_130466 |
| 2339 | UBE3B | GCAGAGAGAUAUCAGGAGA | NM_183414 |
| 2340 | UBE38 | UGUUAGAGGAGGAGACAGA | NM_183415 |
| 2341 | UBE3B | GCAGAAGUCCAGAAGGUUU | NM_130466 |
| 2342 | UBE3B | AGAUAUCAGGAGAGAGAUU | NM_183414 |
| 2343 | UBE3B | CCGUCAGGCACGAGAAGAA | NM_183414 |
| 2344 | UBE3B | GGGAAAAGGUGAAAGUCUU | NM_183414 |
| 2345 | UBE3B | GAAUCAAAGAGGAUAAUGA | NM_183414 |
| 2346 | UBE3B | CAACAGAUCAAGAACAUUU | NM_130466 |
| 2347 | UBE3B | CCAGAGUGUUAGAGGAGGA | NM_130466 |
| 2348 | UBE3B | GUGUGAAGUUUGUCAAUGA | NM_130466 |
| 2349 | UBE3B | CAACAUGCCAGGUGACAUU | NM_130466 |
| 2350 | UBE3B | UCAAGAACAUUUUGUGGUA | NM_183414 |
| 2351 | UBE3B | CAGCAUGGGUUGAGUGUAC | NM_130466 |
| 2352 | UBE3B | CAGAAGAAGUCCAACCUGA | NM_183414 |
| 2353 | UBE4A | GGAGAAAACUGGAGGAAAA | NM_004788 |
| 2354 | UBE4A | UGACAGACCAGGAGAAUAA | NM_004788 |
| 2355 | UBE4A | GGAAAUGAACCUAGAAACA | NM_004788 |
| 2356 | UBE4A | AGAAAUGGCAGUAGAGCUA | NM_004788 |
| 2357 | UBE4A | GAAUAGAUACUGUGAACUA | NM_004788 |
| 2358 | UBE4A | CAGUAGAGCUAGAAGAUCA | NM_004788 |
| 2359 | UBE4A | CAUUAAUGCUGCUGAAUAU | NM_004788 |
| 2360 | UBE4A | GCAACUUGGCAGAGAGAAU | NM_004788 |
| 2361 | UBE4A | CAGAGUAACUUCACAUAAA | NM_004788 |
| 2362 | UBE4A | GCAGGAAAUAUGUGAGCAA | NM_004788 |
| 2363 | UBE4A | GCAUAGAAAGAAUGAAGAA | NM_004788 |
| 2364 | UBE4A | GGAGCAACUUGAAUAGAUA | NM_004788 |
| 2365 | UBE4A | GAGCAGACUUUCUAACAUA | NM_004788 |
| 2366 | UBE4A | GAUAAUAGCGUGUCAGAGA | NM_004788 |
| 2367 | UBE4A | UGAGAAGGAUCGAGGUGAA | NM_004788 |
| 2368 | UBE4A | GGAAUAUGAUUAUGGCUUU | NM_004788 |
| 2369 | UBE4A | GGGAGAGCAUUAAGGAUUU | NM_004788 |
| 2370 | UBE4A | CGGGAGAGCAUUAAGGAUU | NM_004788 |
| 2371 | UBE4A | AUAAAUAAGCCUGGGAAUA | NM_004788 |
| 2372 | UBE4A | GGGCAAAUGUACCAGAAGA | NM_004788 |
| 2373 | UBE4A | CCAAGAGGCUAAUACUAAA | NM_004788 |
| 2374 | UBE4A | GAGGAUACCUUAAAGUGAA | NM_004788 |
| 2375 | UBE4A | GCAUUAAGGAUUUGGCUGA | NM_004788 |
| 2376 | UBE4A | GGAGUUGAAUGAUGAAGAA | NM_004788 |
| 2377 | UBE4A | UCAAAGUACAGGAGGCCAA | NM_004788 |
| 2378 | UBE4A | ACAACAACAUCUCAAGUAA | NM_004788 |
| 2379 | UBE4A | AGUCAUGAUUCCAGUGUUU | NM_004788 |
| 2380 | UBE4A | GGCCAAACACAGAACUAAA | NM_004788 |
| 2381 | UBE4A | UAACUUACCAAGAGGCUAA | NM_004788 |
| 2382 | UBE4A | UGUGUAGACUUCUGAAUAA | NM_004788 |
| 2383 | UBE4B | AGGAAGAGAUGAAGAACAA | NM_006048 |
| 2384 | UBE4B | CAAUAGAACUGUAGAAGAU | NM_006048 |
| 2385 | UBE4B | CCGAGAAAGUGGAGGAGAU | NM_006048 |
| 2386 | UBE4B | ACAGAAAUCUCUUGCUAAA | NM_006048 |
| 2387 | UBE4B | GAAAAUGAUCGAAGAGAAA | NM_006048 |
| 2388 | UBE4B | AGACAGAUAUGCUGAACUA | NM_006048 |
| 2389 | UBE4B | CAAAGAAGCUGUUGGACCA | NM_006048 |
| 2390 | UBE4B | UUGAAAACCCUGAGAAAUA | NM_006048 |
| 2391 | UBE4B | AGAAGAUGUUGCAGAAUUU | NM_006048 |
| 2392 | UBE4B | CGAUGGAAGAUGUGAAUGA | NM_006048 |
| 2393 | UBE4B | CGGCAGACGCUGACAGAGA | NM_006048 |
| 2394 | UBE4B | GAAAGGACAUGGAUGAGAA | NM_006048 |
| 2395 | UBE4B | GGAGCAAGUAAUUGGGAUU | NM_006048 |
| 2396 | UBE4B | GAGUUGGAAUAGAGGAAAA | NM_006048 |
| 2397 | UBE4B | GCAACUAGACACCGCGAAA | NM_006048 |
| 2398 | UBE4B | GGAGAUGAGGGUUGGGUUU | NM_006048 |
| 2399 | UBE4B | UGUAGAAGAUGUUGCAGAA | NM_006048 |
| 2400 | UBE4B | CGAGAAAGUGGAGGAGAUA | NM_006048 |
| 2401 | UBE4B | UAAUGAAAGCCAAUGGAAA | NM_006048 |
| 2402 | UBE4B | UGACACACGUUCAGAAGAA | NM_006048 |
| 2403 | UBE4B | GGACAGACCUCUCAGCCAA | NM_006048 |
| 2404 | UBE4B | CCGAGUUGGAAUAGAGGAA | NM_006048 |
| 2405 | UBE4B | UGGAGGAGAUAGUGGCCAA | NM_006048 |
| 2406 | UBE4B | AAGCGGAGCCUCAGUGAUA | NM_006048 |
| 2407 | UBE4B | CUGCAAUGCUGAACUUUAA | NM_006048 |
| 2408 | UBE4B | GAACUUUAAUCUUCAGCAA | NM_006048 |
| 2409 | UBE4B | UGAAAAUGAUCGAAGAGAA | NM_006048 |
| 2410 | UBE4B | UUGAAAUGAUUGAGAACCA | NM_006048 |
| 2411 | UBE4B | GCUCAAUAGAACUGUAGAA | NM_006048 |
| 2412 | UBE4B | ACAUGGAGGUUGAUGAAAA | NM_006048 |
| 2413 | UBL3 | GAGAGUAAUUGUUGUGUAA | NM_007106 |
| 2414 | UBL3 | AGACAUUACCAGAGCCAAA | NM_007106 |
| 2415 | UBL3 | GAAAUAAACUGGUUCACUA | NM_007106 |
| 2416 | UBL3 | UGAGAAGACUGGAGAGAGU | NM_007106 |
| 2417 | UBL3 | CCAAAUAUUCUACGACUUA | NM_007106 |
| 2418 | UBL3 | GUACAUAAAGCCUGAAUGA | NM_007106 |
| 2419 | UBL3 | GGUCAGAGGAAUCGUGAGA | NM_007106 |
| 2420 | UBL3 | GCACAGAAUACUAAACUGA | NM_007106 |
| 2421 | UBL3 | GCACAGCACUAAAGCAUGA | NM_007106 |
| 2422 | UBL3 | UCACAACAAUGGAUAGAAU | NM_007106 |
| 2423 | UBL3 | GCAUAGAUCCAGUAAUGUA | NM_007106 |
| 2424 | UBL3 | GUAUAUGACAAUUGGCCAA | NM_007106 |
| 2425 | UBL3 | GUAAAUAGCACUAAACGUU | NM_007106 |
| 2426 | UBL3 | GUUAAUUUGUGGACAGUCA | NM_007106 |
| 2427 | UBL3 | GAGCAGAGUUUUAAAAUGA | NM_007106 |
| 2428 | UBL3 | CAUAAAGCCUGAAUGAUGA | NM_007106 |
| 2429 | UBL3 | GAUAUUAGUGCUUGCAAUU | NM_007106 |
| 2430 | UBL3 | AAACAACAGUGAUGCAUUU | NM_007106 |
| 2431 | UBL3 | GAAAGAAUUACGUCGCUUA | NM_007106 |
| 2432 | UBL3 | GUAACUGAGUGUUUGUUUA | NM_007106 |
| 2433 | UBL3 | AGAAGACUGGAGAGAGUAA | NM_007106 |
| 2434 | UBL3 | GGUCAGCAGUCCAAAUAUU | NM_007106 |
| 2435 | UBL3 | CAGCGUUGUUUAAAUGUAA | NM_007106 |
| 2436 | UBL3 | GUAAACACAUGGAACUGAA | NM_007106 |
| 2437 | UBL3 | UGUCACAUUAGGAGCAUUA | NM_007106 |
| 2438 | UBL3 | GGUGAGAGCUGCAUAGAUC | NM_007106 |
| 2439 | UBL3 | CAAAGCAUGUAUAUGACAA | NM_007106 |
| 2440 | UBL3 | CGACAUUGCUUCAGAAACC | NM_007106 |
| 2441 | UBL3 | GAGUAAUUGUUGUGUAAUC | NM_007106 |
| 2442 | UBL3 | UGUGUGGUAUCUAGAAAUA | NM_007106 |
| 2443 | UBL4 | GGAAACGACUCUCGGAUUA | NM_014235 |
| 2444 | UBL4 | AGACAAUGGAGAAGGGCUU | NM_014235 |
| 2445 | UBL4 | CUGAAGUGACUGAGACAAU | NM_014235 |
| 2446 | UBL4 | GAACAGCUACAGAGGGAUU | NM_014235 |
| 2447 | UBL4 | UGGAACAGCUACAGAGGGA | NM_014235 |
| 2448 | UBL4 | UGACUGAGACAAUGGAGAA | NM_014235 |
| 2449 | UBL4 | GGCCCUGGCAGAUGGGAAA | NM_014235 |
| 2450 | UBL4 | GGGAAACGACUCUCGGAUU | NM_014235 |
| 2451 | UBL4 | CUACAGAGGGAUUACGAGA | NM_014235 |
| 2452 | UBL4 | GAAGGUGCUACUAGAAGAA | NM_014235 |
| 2453 | UBL4 | AGAAGGUGCUACUAGAAGA | NM_014235 |
| 2454 | UBL4 | AGCUCAACCUAGUGGUCAA | NM_014235 |
| 2455 | UBL4 | GGAGAAGGUGCUACUAGAA | NM_014235 |
| 2456 | UBL4 | UAGAAGAAGGCGAGGCCCA | NM_014235 |
| 2457 | UBL4 | UGGAGAAGGUGCUACUAGA | NM_014235 |
| 2458 | UBL4 | CAGCUGAUCUCCAAAGUCU | NM_014235 |
| 2459 | UBL4 | ACUCCAAGCUCAACCUAGU | NM_014235 |
| 2460 | UBL4 | GAAACGACUCUCGGAUUAU | NM_014235 |
| 2461 | UBL4 | GCAGAUGGGAAACGACUCU | NM_014235 |
| 2462 | UBL4 | GAGAAGGUGCUACUAGAAG | NM_014235 |
| 2463 | UBL4 | AAACGACUCUCGGAUUAUA | NM_014235 |
| 2464 | UBL4 | UCUGGCAGCUGAUCUCCAA | NM_014235 |
| 2465 | UBL4 | UGAAGUGACUGAGACAAUG | NM_014235 |
| 2466 | UBL4 | GCUGAUCUCCAAAGUCUUG | NM_014235 |
| 2467 | UBL4 | GGCAGCUGAUCUCCAAAGU | NM_014235 |
| 2468 | UBL4 | GAAGUGACUGAGACAAUGG | NM_014235 |
| 2469 | UBL4 | CAACUCCAAGCUCAACCUA | NM_014235 |
| 2470 | UBL5 | GGAUGAACCUGGAGCUUUA | NM_024292 |
| 2471 | UBL5 | GGGAAGAAGGUCCGCGUUA | NM_024292 |
| 2472 | UBL5 | GAUAGAUGCUUGUUUGUAA | NM_024292 |
| 2473 | UBL5 | GAAGAAGGUCCGCGUUAAA | NM_024292 |
| 2474 | UBL5 | GGAAGAAGGUCCGCGUUAA | NM_024292 |
| 2475 | UBL5 | CUGAAGAAGUGGUACACGA | NM_024292 |
| 2476 | UBL5 | AAGAAGUGGUACACGAUUU | NM_024292 |
| 2477 | UBL5 | UGAUCGAGGUUGUUUGCAA | NM_024292 |
| 2478 | UBL5 | CUAGGAUGAUCGAGGUUGU | NM_024292 |
| 2479 | UBL5 | GGGAUGAACCUGGAGCUUU | NM_024292 |
| 2480 | UBL5 | GCAACACGGAUGAUACCAU | NM_024292 |
| 2481 | UBL5 | UGAAGAAGUGGUACACGAU | NM_024292 |
| 2482 | UBL5 | GAACCUGGAGCUUUAUUAU | NM_024292 |
| 2483 | UBL5 | UUAAAUGCAACACGGAUGA | NM_024292 |
| 2484 | UBL5 | CCUGGAGCUUUAUUAUCAA | NM_024292 |
| 2485 | UBL5 | GAAGAAGUGGUACACGAUU | NM_024292 |
| 2486 | UBL5 | GGUACCCGUUGGAACAAGA | NM_024292 |
| 2487 | UBL5 | GGAUAGAUGCUUGUUUGUA | NM_024292 |
| 2488 | UBL5 | AAGAUUGUCCUGAAGAAGU | NM_024292 |
| 2489 | UBL5 | ACCUGGAGCUUUAUUAUCA | NM_024292 |
| 2490 | UBL5 | AAAUGCAACACGGAUGAUA | NM_024292 |
| 2491 | UBL5 | UGGGAUAGAUGCUUGUUUG | NM_024292 |
| 2492 | UBL5 | AGAUUGUCCUGAAGAAGUG | NM_024292 |
| 2493 | UBL5 | UGAACCUGGAGCUUUAUUA | NM_024292 |
| 2494 | UBL5 | GACCUUAAGAAGCUGAUUG | NM_024292 |
| 2495 | UBL5 | AGAAGGUCCGCGUUAAAUG | NM_024292 |
| 2496 | UBL5 | AAGAAGGUCCGCGUUAAAU | NM_024292 |
| 2497 | UBL5 | GAAGGUCCGCGUUAAAUGC | NM_024292 |
| 2498 | UBL5 | GAUGAUCGAGGUUGUUUGC | NM_024292 |
| 2499 | UBR1 | GGAUGAAUAUGGAGAAACA | NM_174916 |
| 2500 | UBR1 | UCAAAUAGCAUCAAGGAAA | NM_174916 |
| 2501 | UBR1 | GAUUAUGGCUCAUCAGAAA | NM_174916 |
| 2502 | UBR1 | GUGAAGCGAUUAAGAGAAA | NM_174916 |
| 2503 | UBR1 | CUGCAGAUGAUGAGCGAAA | NM_174916 |
| 2504 | UBR1 | GGACAAAUUGGGAAGAGUA | NM_174916 |
| 2505 | UBR1 | GGACAGAAAGAUUAAGAAU | NM_174916 |
| 2506 | UBR1 | AGAAAUGACUAUAUGGGAA | NM_174916 |
| 2507 | UBR1 | CUUGGAAAGUGGAGAAUAU | NM_174916 |
| 2508 | UBR1 | GAACAUAUGCAGAAGAAAA | NM_174916 |
| 2509 | UBR1 | AAGAAGAACAGGAGGUGAA | NM_174916 |
| 2510 | UBR1 | CCAGAAAUCUACUGCCUUA | NM_174916 |
| 2511 | UBR1 | GCUUAGAGAAUGUCAUAAA | NM_174916 |
| 2512 | UBR1 | GGGAAGAGUAUAUGCAGUA | NM_174916 |
| 2513 | UBR1 | GGUCCUGGUUGAAGGUAAA | NM_174916 |
| 2514 | UBR1 | CAAAUAGCAUCAAGGAAAU | NM_174916 |
| 2515 | UBR1 | CUAUGGAAUUUGUGAAGUA | NM_174916 |
| 2516 | UBR1 | GGAGAAAACAAGAAAACAA | NM_174916 |
| 2517 | UBR1 | UAGAGGUACUAGUGGAAUA | NM_174916 |
| 2518 | UBR1 | ACAAAGUCCUACAGAGUAU | NM_174916 |
| 2519 | UBR1 | AGGAAGAUAUAAAGAGUCA | NM_174916 |
| 2520 | UBR1 | AUAAACAACUGCAGAAAGA | NM_174916 |
| 2521 | UBR1 | GCUGAGAUGUGGCGAAGAA | NM_174916 |
| 2522 | UBR1 | CCAAAGAAGAGGUCACAAU | NM_174916 |
| 2523 | UBR1 | CCAAAUGGCUUUUCAUAUU | NM_174916 |
| 2524 | UBR1 | CUAUAUGGGAAGAGGAAAA | NM_174916 |
| 2525 | UBR1 | UUUCAAAAGUGGAGAGACA | NM_174916 |
| 2526 | UBR1 | CAAUAUGGACAGAAAGAUU | NM_174916 |
| 2527 | UBR1 | GGUACUGAGAGGAUGGAAA | NM_174916 |
| 2528 | UBR1 | CCGAAGACAGGUUGGGCAA | NM_174916 |
| 2529 | UCHL1 | GGCCAAUAAUCAAGACAAA | NM_004181 |
| 2530 | UCHL1 | CAUGAGAACUUCAGGAAAA | NM_004181 |
| 2531 | UCHL1 | UUGAAGAGCUGAAGGGACA | NM_004181 |
| 2532 | UCHL1 | GGGUAGAUGACAAGGUGAA | NM_004181 |
| 2533 | UCHL1 | CCGCGAAGAUGCAGCUCAA | NM_004181 |
| 2534 | UCHL1 | GCCAAGGUCUGCAGAGAAU | NM_004181 |
| 2535 | UCHL1 | GAAGCAGACCAUUGGGAAU | NM_004181 |
| 2536 | UCHL1 | GCAUGAGAACUUCAGGAAA | NM_004181 |
| 2537 | UCHL1 | AGACCUUGGAUGUGGUUUA | NM_004181 |
| 2538 | UCHL1 | GCUGAAGGGACAAGAAGUU | NM_004181 |
| 2539 | UCHL1 | CUAUGAACUUGAUGGACGA | NM_004181 |
| 2540 | UCHL1 | CUAAAAUGCUUCAGUACUU | NM_004181 |
| 2541 | UCHL1 | GGAUGUGGUUUAAUUGUUU | NM_004181 |
| 2542 | UCHL1 | CCAAUAAUCAAGACAAACU | NM_004181 |
| 2543 | UCHL1 | CGGCCCAGCAUGAGAACUU | NM_004181 |
| 2544 | UCHL1 | UAGAUGACAAGGUGAAUUU | NM_004181 |
| 2545 | UCHL1 | CCCUGAAGACAGAGCAAAA | NM_004181 |
| 2546 | UCHL1 | CAGCUCAAGCCGAUGGAGA | NM_004181 |
| 2547 | UCHL1 | CCGAGAUGCUGAACAAAGU | NM_004181 |
| 2548 | UCHL1 | GGGAUUUGAGGAUGGAUCA | NM_004181 |
| 2549 | UCHL1 | GGUUUCUGUCUGUAAGUUA | NM_004181 |
| 2550 | UCHL1 | GUUUCUGUCUGUAAGUUAA | NM_004181 |
| 2551 | UCHL1 | CCUUGGAUGUGGUUUAAUU | NM_004181 |
| 2552 | UCHL1 | GGAGGGACUUUGCUGAUUU | NM_004181 |
| 2553 | UCHL1 | AAGCAGACCAUUGGGAAUU | NM_004181 |
| 2554 | UCHL1 | ACGCAGUGGCCAAUAAUCA | NM_004181 |
| 2555 | UCHL1 | UUAACAACGUGGAUGGCCA | NM_004181 |
| 2556 | UCHL1 | CAGAGGACACCCUGCUGAA | NM_004181 |
| 2557 | UCHL1 | CUGAAGGGACAAGAAGUUA | NM_004181 |
| 2558 | UCHL1 | GGUGUGAGCUUCAGAUGGU | NM_004181 |
| 2559 | UCHL3 | CAGCAUAGCUUGUCAAUAA | NM_006002 |
| 2560 | UCHL3 | GAACAGAAGAGGAAGAAAA | NM_006002 |
| 2561 | UCHL3 | CAGCAAUGCCUGUGGAACA | NM_006002 |
| 2562 | UCHL3 | UGGUGAAACUAGUGAUGAA | NM_006002 |
| 2563 | UCHL3 | GGCAAUUCGUUGAUGUAUA | NM_006002 |
| 2564 | UCHL3 | AUUCAGAACAGAAGAGGAA | NM_006002 |
| 2565 | UCHL3 | CUGAAGAACGAGCCAGAUA | NM_006002 |
| 2566 | UCHL3 | CCUGAUGAACUAAGAUUUA | NM_006002 |
| 2567 | UCHL3 | CCAAUUAACCAUGGUGAAA | NM_006002 |
| 2568 | UCHL3 | GAACUAAGAUUUAAUGCGA | NM_006002 |
| 2569 | UCHL3 | CCAUAGAAGUUUGCAAGAA | NM_006002 |
| 2570 | UCHL3 | CAGUAUAUUUCAUGAAGCA | NM_006002 |
| 2571 | UCHL3 | AAAUAAAAUCUCAGGGACA | NM_006002 |
| 2572 | UCHL3 | GAAGUUUGCAAGAAGUUUA | NM_006002 |
| 2573 | UCHL3 | ACCAAGUAUAGAUGAGAAA | NM_006002 |
| 2574 | UCHL3 | GCGCGACCCUGAUGAACUA | NM_006002 |
| 2575 | UCHL3 | UGGAACAAUUGGACUGAUU | NM_006002 |
| 2576 | UCHL3 | UCAGAACAGAAGAGGAAGA | NM_006002 |
| 2577 | UCHL3 | GUCAAUGAGCCCUGAAGAA | NM_006002 |
| 2578 | UCHL3 | CAAGUAUAGAUGAGAAAGU | NM_006002 |
| 2579 | UCHL3 | CAAUAAUGGAAACACCAAA | NM_006002 |
| 2580 | UCHL3 | GCACUUUGAAUCUGGAUCA | NM_006002 |
| 2581 | UCHL3 | ACAAUAAAGACAAGAUGCA | NM_006002 |
| 2582 | UCHL3 | GCAAUUCGUUGAUGUAUAU | NM_006002 |
| 2583 | UCHL3 | GUAUAGAUGAGAAAGUAGA | NM_006002 |
| 2584 | UCHL3 | CACCAAGUAUAGAUGAGAA | NM_006002 |
| 2585 | UCHL3 | GAACAAUUGGACUGAUUCA | NM_006002 |
| 2586 | UCHL3 | UCGUUGAUGUAUAUGGAAU | NM_006002 |
| 2587 | UCHL3 | UGAAACUAGUGAUGAAACU | NM_006002 |
| 2588 | UCHL3 | AGACUGAGGCACCAAGUAU | NM_006002 |
| 2589 | UCHL5 | GUUUAGAGCCUGAGAAUUU | NM_015984 |
| 2590 | UCHL5 | GCAGAAGAUAGCAGAGUUA | NM_015984 |
| 2591 | UCHL5 | GGAUACAGAUCAAGGUAAU | NM_015984 |
| 2592 | UCHL5 | GCAAAGAAAGCUCAGGAAA | NM_015984 |
| 2593 | UCHL5 | UGAAGAAGAAGUACAGAAA | NM_015984 |
| 2594 | UCHL5 | GUACAGUGAAGGUGAAAUU | NM_015984 |
| 2595 | UCHL5 | GUUAAUACCACUAGUAGAA | NM_015984 |
| 2596 | UCHL5 | GCUUAUUGAAGAAGAAGUA | NM_015984 |
| 2597 | UCHL5 | GUAGAAAAGGCAAAAGAAA | NM_015984 |
| 2598 | UCHL5 | GAGCCCAAGUAGAAGAAAU | NM_015984 |
| 2599 | UCHL5 | GCACAAACGAUAUUCCUUA | NM_015984 |
| 2600 | UCHL5 | UAGCAGAGUUACAAAGACA | NM_015984 |
| 2601 | UCHL5 | UAAAGAACUUAGAGCAACA | NM_015984 |
| 2602 | UCHL5 | CAAAGAAAGCUCAGGAAAC | NM_015984 |
| 2603 | UCHL5 | GAUUAAACUGGUUGUCUUA | NM_015984 |
| 2604 | UCHL5 | CCGAGGAGCCCAAGUAGAA | NM_015984 |
| 2605 | UCHL5 | GAGUUUAGAGCCUGAGAAU | NM_015984 |
| 2606 | UCHL5 | AGCCAUAGUGAGUGUGUUA | NM_015984 |
| 2607 | UCHL5 | GAGGAGGAACCCAUGGAUA | NM_015984 |
| 2608 | UCHL5 | AGAAGGACCGAUUGAUUUA | NM_015984 |
| 2609 | UCHL5 | GAGCAAUUCAGAUGUGAUU | NM_015984 |
| 2610 | UCHL5 | GUUAAGUGCUAUUCAGUCA | NM_015984 |
| 2611 | UCHL5 | AGCCCAAGUAGAAGAAAUA | NM_015984 |
| 2612 | UCHL5 | UCAGAUGCUUAUUGAAGAA | NM_015984 |
| 2613 | UCHL5 | UGAUAUAUGAGCAGAAGAU | NM_015984 |
| 2614 | UCHL5 | GAGAAGGACCGAUUGAUUU | NM_015984 |
| 2615 | UCHL5 | AGAUGUGAUUCGACAAGUA | NM_015984 |
| 2616 | UCHL5 | CAGUAAGGCCUGUCAUAGA | NM_015984 |
| 2617 | UCHL5 | GAUGCUUAUUGAAGAAGAA | NM_015984 |
| 2618 | UCHL5 | GAUACGAAGACAUCAGCAA | NM_015984 |
| 2619 | UEV3 | GGGCAAAUCAUGAGAAUAA | NM_018314 |
| 2620 | UEV3 | AGAAAGACCUGCUGAAUUU | NM_018314 |
| 2621 | UEV3 | CAACAGGGAUAUUAUGAUA | NM_018314 |
| 2622 | UEV3 | CGAGCAAGGAGAAGACAAA | NM_018314 |
| 2623 | UEV3 | GCAAAGAAGUAUGGGUUAU | NM_018314 |
| 2624 | UEV3 | AAGAAGAAGUAGUGAGUCU | NM_018314 |
| 2625 | UEV3 | GGCACAGACUUCAGGCAAA | NM_018314 |
| 2626 | UEV3 | GGACCUAACUGUGGAAGAA | NM_018314 |
| 2627 | UEV3 | GGCAAAGAAGUAUGGGUUA | NM_018314 |
| 2628 | UEV3 | UCACAGAGAUUACAGUAUA | NM_018314 |
| 2629 | UEV3 | GAUCGGAAUUGGAUGUAAU | NM_018314 |
| 2630 | UEV3 | UGGGAAUCUUAGUCGGAAA | NM_018314 |
| 2631 | UEV3 | UUACAAACUGCUUGGUUAA | NM_018314 |
| 2632 | UEV3 | CAGUGGAAAUCAUGACCUA | NM_018314 |
| 2633 | UEV3 | GUACAGAGCAAUGUGGAUA | NM_018314 |
| 2634 | UEV3 | GUAGAGGGUUUCUUGAUUA | NM_018314 |
| 2635 | UEV3 | CAGAAAGACCUGCUGAAUU | NM_018314 |
| 2636 | UEV3 | CGGUAUUGCCUGCACAUUA | NM_018314 |
| 2637 | UEV3 | GCUCAAGGCAGAAUAUAUU | NM_018314 |
| 2638 | UEV3 | UUUACAAACUGCUUGGUUA | NM_018314 |
| 2639 | UEV3 | AGAAAUGAUUGCCAAGUUU | NM_018314 |
| 2640 | UEV3 | CAUCUCAACCAGUGGAAAU | NM_018314 |
| 2641 | UEV3 | CCAAGAAGAAGUAGUGAGU | NM_018314 |
| 2642 | UEV3 | AAUUCAAAGAGCUGGGCAA | NM_018314 |
| 2643 | UEV3 | AGGCAAAGAAGUAUGGGUU | NM_018314 |
| 2644 | UEV3 | GAAAGAAGAUACAGUUACU | NM_018314 |
| 2645 | UEV3 | GGUUGGAGGUGGAGAACUC | NM_018314 |
| 2646 | UEV3 | UUGAUGUGGUACAGAGCAA | NM_018314 |
| 2647 | UEV3 | CCAAUUCGUUUCUGGAUUU | NM_018314 |
| 2648 | UEV3 | GCAGAAUAUAUUUGCCCUA | NM_018314 |
| 2649 | UFD1L | GCAAUAGACUGGAUGGAAA | NM_005659 |
| 2650 | UFD1L | GGAUGAAGCUGGAGGCAGA | NM_005659 |
| 2651 | UFD1L | GAGAAAGGAGGGAAGAUAA | NM_005659 |
| 2652 | UFD1L | ACAAAGAACCCGAAAGACA | NM_005659 |
| 2653 | UFD1L | GGAGAAAGGAGGGAAGAUA | NM_005659 |
| 2654 | UFD1L | AAUCAAGCCUGGAGAUAUU | NM_005659 |
| 2655 | UFD1L | GGAAGAAAGCCCUAAGUGA | NM_005659 |
| 2656 | UFD1L | CUACAAAGAACCCGAAAGA | NM_005659 |
| 2657 | UFD1L | CAAAGAACCCGAAAGACAA | NM_005659 |
| 2658 | UFD1L | GGACAGUCAUUGCGUAAAA | NM_005659 |
| 2659 | UFD1L | AGAAAGGAGGGAAGAUAAU | NM_005659 |
| 2660 | UFD1L | GGUCAGAUGUGGAGAAAGG | NM_005659 |
| 2661 | UFD1L | GGAGAUAUUAAAAGAGGAA | NM_005659 |
| 2662 | UFD1L | CCAAUCAAGCCUGGAGAUA | NM_005659 |
| 2663 | UFD1L | CGACAGAAGGUGAAGCCGA | NM_005659 |
| 2664 | UFD1L | GCCAUCAACUAUAAUGAAA | NM_005659 |
| 2665 | UFD1L | UGUUCAAACUGACCAAUAA | NM_005659 |
| 2666 | UFD1L | AAAGACAAGUCCAGCAUGA | NM_005659 |
| 2667 | UFD1L | AAAGGAGGGAAGAUAAUUA | NM_005659 |
| 2668 | UFD1L | CCAAAGCCGUAUUAGAAAA | NM_005659 |
| 2669 | UFD1L | AAGGACAGUCAUUGCGUAA | NM_005659 |
| 2670 | UFD1L | CAAACUGACCAAUAAGAAU | NM_005659 |
| 2671 | UFD1L | ACUGUUGGCUGAUUGGAAA | NM_005659 |
| 2672 | UFD1L | CAGGUCAGAUGUGGAGAAA | NM_005659 |
| 2673 | UFD1L | GGUAAGAUAACUUUCAUCA | NM_005659 |
| 2674 | UFD1L | CCCAAAGCCGUAUUAGAAA | NM_005659 |
| 2675 | UFD1L | CGAAAGACAAGUCCAGCAU | NM_005659 |
| 2676 | UFD1L | GUGACAUGAACGUGGACUU | NM_005659 |
| 2677 | UFD1L | UGGAAAGAAGAAAGGGGUA | NM_005659 |
| 2678 | UFD1L | CAUGAGGAGUCGACAGAAG | NM_005659 |
| 2679 | USP1 | AAACAAAGGUGAAGAACAA | NM_003368 |
| 2680 | USP1 | GAAGAGAACCAGAGACAAA | NM_003368 |
| 2681 | USP1 | GCAUAGAGAUGGACAGUAU | NM_003368 |
| 2682 | USP1 | AGAAAGGAUUGUAGGAGAA | NM_003368 |
| 2683 | USP1 | AAUUAGAGUUGGUGGAAAU | NM_003368 |
| 2684 | USP1 | AGAAAUACCUCAUCCGAAA | NM_003368 |
| 2685 | USP1 | GAAAGAAGCUCUAAAGGAU | NM_003368 |
| 2686 | USP1 | GAUUGUAGGAGAAGAUAAA | NM_003368 |
| 2687 | USP1 | GGGAAACAUUCAAGAAACA | NM_003368 |
| 2688 | USP1 | GUUUUGAGCUAGUGGAGAA | NM_003368 |
| 2689 | USP1 | UGACCAAAUGUGUGAAAUA | NM_003368 |
| 2690 | USP1 | GGUUAAAGUCUGCAACUAA | NM_003368 |
| 2691 | USP1 | CCAAGGAGUCAAAGGACAA | NM_003368 |
| 2692 | USP1 | GGGAAGUGUGAAAGUGAUA | NM_003368 |
| 2693 | USP1 | GGUUUUAAAUCUGGAGUAA | NM_003368 |
| 2694 | USP1 | GUGCAAAGCUUAAAGGAGU | NM_003368 |
| 2695 | USP1 | CUAGAAGAAUGGAGCACAA | NM_003368 |
| 2696 | USP1 | GAGACAAACUAGAUCAAAA | NM_003368 |
| 2697 | USP1 | GAAUAUAGAGCAUCUGAAA | NM_003368 |
| 2698 | USP1 | UGGAAGAGAACCAGAGACA | NM_003368 |
| 2699 | USP1 | UGUAGAAGCUAUUGGACUU | NM_003368 |
| 2700 | USP1 | CAAAGCAGAUUAUGAGCUA | NM_003368 |
| 2701 | USP1 | CUGAAGACUUUAAAGAGAA | NM_003368 |
| 2702 | USP1 | GGGAAAUUGCAAAGAAGAU | NM_003368 |
| 2703 | USP1 | AGUCAAAGGACAAUCUAAA | NM_003368 |
| 2704 | USP1 | GGAAAUACACAGCCAAGUA | NM_003368 |
| 2705 | USP1 | UGUCAUACCUAGUGAAAGU | NM_003368 |
| 2706 | USP1 | UAGAAAGGAUUGUAGGAGA | NM_003368 |
| 2707 | USP1 | GGAAGAAAGAAGCUCUAAA | NM_003368 |
| 2708 | USP1 | GGGGUGUGGUUGAGAAUUA | NM_003368 |
| 2709 | USP10 | AAGAAGAUGCUGAGGAAUA | NM_005153 |
| 2710 | USP10 | CAAACAAGAGGUUGAGAUA | NM_005153 |
| 2711 | USP10 | GAUAAAAUCGUGAGGGAUA | NM_005153 |
| 2712 | USP10 | ACAAGAAGAUGCUGAGGAA | NM_005153 |
| 2713 | USP10 | GAGAUAAGAAAGUGGAUUU | NM_005153 |
| 2714 | USP10 | CCACAGAAGCCCUGGUCAA | NM_005153 |
| 2715 | USP10 | GAGGAAAUGUUGAACCUAA | NM_005153 |
| 2716 | USP10 | GAGAUAAGUCGAAGAGUGA | NM_005153 |
| 2717 | USP10 | GGACAAAGGGAGCGUAAAA | NM_005153 |
| 2718 | USP10 | GGACAAGAAUAUCAGAGAA | NM_005153 |
| 2719 | USP10 | GACAAGAAUAUCAGAGAAU | NM_005153 |
| 2720 | USP10 | AAGAAGAGCAGGAAGAACA | NM_005153 |
| 2721 | USP10 | AGGAAAUGUUGAACCUAAA | NM_005153 |
| 2722 | USP10 | CCAUAAAGAUUGCAGAGUU | NM_005153 |
| 2723 | USP10 | GAGAAUCUGUCCAAGGUUA | NM_005153 |
| 2724 | USP10 | AUGCAGAAUUUAUGGGUGA | NM_005153 |
| 2725 | USP10 | CAGCCUACCUCCUGUAUUA | NM_005153 |
| 2726 | USP10 | UUGCAGAGUUGCUGGAGAA | NM_005153 |
| 2727 | USP10 | UAAACUACCUGAUGGACAA | NM_005153 |
| 2728 | USP10 | AUGAAGAAGAGCAGGAAGA | NM_005153 |
| 2729 | USP10 | GCAGGAAGAACAAGGUGAA | NM_005153 |
| 2730 | USP10 | GGAAGAACAAGGUGAAGGA | NM_005153 |
| 2731 | USP10 | GGGAACUGGUGCUACAUUA | NM_005153 |
| 2732 | USP10 | UGGAGUUGCUAAUGGACAA | NM_005153 |
| 2733 | USP10 | CAGCAGAGUUCAAAAGAAU | NM_005153 |
| 2734 | USP10 | GGAAAUUAGUAAAGAACUG | NM_005153 |
| 2735 | USP10 | UGAAAAGGGUCGACAAGAA | NM_005153 |
| 2736 | USP10 | CCACAUAUAUUUACAGACU | NM_005153 |
| 2737 | USP10 | GGACUUGGAAAUUAGUAAA | NM_005153 |
| 2738 | USP10 | GUGAAGGAAGCGAGGAUGA | NM_005153 |
| 2739 | USP11 | AGGUAGAGGCUGAGGGCUA | NM_004651 |
| 2740 | USP11 | CGGAAGAGGAUGAGGACUU | NM_004651 |
| 2741 | USP11 | GGGUGAAGAAGAAGGAGUA | NM_004651 |
| 2742 | USP11 | AAGAUGACGAGGAGGAUAA | NM_004651 |
| 2743 | USP11 | GUGGAGAAGCACUGGUAUA | NM_004651 |
| 2744 | USP11 | UCAGAAGGCUCUUUGGAUA | NM_004651 |
| 2745 | USP11 | GCACAGGAGGCAUGGCAAA | NM_004651 |
| 2746 | USP11 | UGGUGGAAGGCGAGGAUUA | NM_004651 |
| 2747 | USP11 | CAGAGAUGAAGAAGCGUUA | NM_004651 |
| 2748 | USP11 | GGGAUGAGAAAGAAGAUGA | NM_004651 |
| 2749 | USP11 | GAACAAGGUUGGCCAUUUU | NM_004651 |
| 2750 | USP11 | GGACGAUGGGGAUGAGAAA | NM_004651 |
| 2751 | USP11 | GAGAUAAACUGGCGCCUCA | NM_004651 |
| 2752 | USP11 | UGUAUAACGUCCUGAUGUA | NM_004651 |
| 2753 | USP11 | AGAAAGAAGAUGACGAGGA | NM_004651 |
| 2754 | USP11 | ACAACAACAUGUCGGAAGA | NM_004651 |
| 2755 | USP11 | AGAAUCAGAUCGAGUCCAA | NM_004651 |
| 2756 | USP11 | GCUGGUUCCUUGUGGAGAA | NM_004651 |
| 2757 | USP11 | GGCACAAUGAUUUGGGCAA | NM_004651 |
| 2758 | USP11 | AUGACGAGGUAGAGGCUGA | NM_004651 |
| 2759 | USP11 | CCGAGUACUUCCUCAACAA | NM_004651 |
| 2760 | USP11 | GCUCUGAGUUCAUGGAUGU | NM_004651 |
| 2761 | USP11 | AUGCAGACCUGGUGAAGCA | NM_004651 |
| 2762 | USP11 | GGCACUACUUUGAUGACAA | NM_004651 |
| 2763 | USP11 | CUGGUAUGGUCUAGAGCAU | NM_004651 |
| 2764 | USP11 | AAGAAGAUGACGAGGAGGA | NM_004651 |
| 2765 | USP11 | GGGCAUGAAGGGUGAGAUC | NM_004651 |
| 2766 | USP11 | GUUACUAUGACGAGGUAGA | NM_004651 |
| 2767 | USP11 | GUUCAUGGAUGUUAAUUGA | NM_004651 |
| 2768 | USP11 | GUGAGAUCGCAGAGGCCUA | NM_004651 |
| 2769 | USP12 | CAGCAAAGAUGAAGAUUUU | NM_182488 |
| 2770 | USP12 | CCUAAGAAGUUCAUCACAA | NM_182488 |
| 2771 | USP12 | GAAGAGAGAAAGCAGGAAA | NM_182488 |
| 2772 | USP12 | CAUCACAAGAUUACGGAAA | NM_182488 |
| 2773 | USP12 | UUGCAAUAGUUAAGAGUCA | NM_182488 |
| 2774 | USP12 | CCACCAAUCCAGACAGAAU | NM_182488 |
| 2775 | USP12 | GCAGCAAAGAUGAAGAUUU | NM_182488 |
| 2776 | USP12 | ACAAGAUUACGGAAAGAAA | NM_182488 |
| 2777 | USP12 | UGCACAAGCUAUUGAAGAA | NM_182488 |
| 2778 | USP12 | GGAUCAACUUCAUCGAUAU | NM_182488 |
| 2779 | USP12 | CACAAACGGAUGAAAGUUA | NM_182488 |
| 2780 | USP12 | GAAAGAGAUUGGUCCAGAA | NM_182488 |
| 2781 | USP12 | ACAAACGGAUGAAAGUUAA | NM_182488 |
| 2782 | USP12 | GCGUAUAAGAGUCAACCUA | NM_182488 |
| 2783 | USP12 | CAGAACAGUUUCCGGUCAA | NM_182488 |
| 2784 | USP12 | CAUCAGAUAUCUCAAAGAA | NM_182488 |
| 2785 | USP12 | GGCAUUAGAGAAAGAGAUU | NM_182488 |
| 2786 | USP12 | GCCCAUGAUUCUAGCUCUA | NM_182488 |
| 2787 | USP12 | GCAAACAGGAAGCACACAA | NM_182488 |
| 2788 | USP12 | GCAACAAGAUGCCCAUGAA | NM_182488 |
| 2789 | USP12 | UGGAUCAACUUCAUCGAUA | NM_182488 |
| 2790 | USP12 | GCAUAGCCACUCAGAAGAA | NM_182488 |
| 2791 | USP12 | GUUUAACACUUCAGGUGAU | NM_182488 |
| 2792 | USP12 | CAAACAGGAAGCACACAAA | NM_182488 |
| 2793 | USP12 | GAUCAACUUCAUCGAUAUA | NM_182488 |
| 2794 | USP12 | GCAGCAAACAGGAAGCACA | NM_182488 |
| 2795 | USP12 | UGAAGAGUGUCGCAGCAAA | NM_182488 |
| 2796 | USP12 | UUGAAGAAUUCUACGGGUU | NM_182488 |
| 2797 | USP12 | CGGCAUUAGAGAAAGAGAU | NM_182488 |
| 2798 | USP12 | UCAAUUACUCACUGCUUAA | NM_182488 |
| 2799 | USP13 | UGAUUGAGAUGGAGAAUAA | NM_003940 |
| 2800 | USP13 | GCACGAAACUGAAGCCAAU | NM_003940 |
| 2801 | USP13 | GGGAACAUGUUGAAAGACA | NM_003940 |
| 2802 | USP13 | GGUCAUUACAUUUGCCAUA | NM_003940 |
| 2803 | USP13 | AGAAUGGGCUCCAGGACAA | NM_003940 |
| 2804 | USP13 | AGACAGUGAUUUUGUGAUU | NM_003940 |
| 2805 | USP13 | UGAUGAAGGAGGAGCACAA | NM_003940 |
| 2806 | USP13 | AUAUGAAGAUGAAGCCAAA | NM_003940 |
| 2807 | USP13 | GAAGGGAAGCAGAAGCAAA | NM_003940 |
| 2808 | USP13 | GCGACAGGGUCUACAAGAA | NM_003940 |
| 2809 | USP13 | UGAAAUAGCACUACCAAAU | NM_003940 |
| 2810 | USP13 | GGACAAUGGAGUCAGGAUU | NM_003940 |
| 2811 | USP13 | ACACGGAGAGGGUGGAUUA | NM_003940 |
| 2812 | USP13 | UGAAGAAGACAGUGAUUUU | NM_003940 |
| 2813 | USP13 | GAGAAUAAUGCCAAUGCAA | NM_003940 |
| 2814 | USP13 | GGAUGGAUCUGGAACAUAU | NM_003940 |
| 2815 | USP13 | ACGAAUAAUAACCUGGAAA | NM_003940 |
| 2816 | USP13 | AGAAUAAUGCCAAUGCAAA | NM_003940 |
| 2817 | USP13 | ACUUGGUAGUGCAGAUAAA | NM_003940 |
| 2818 | USP13 | AGGAUGAACUGAUCGCUUA | NM_003940 |
| 2819 | USP13 | GGGCAGAUGUUUAUUCUUU | NM_003940 |
| 2820 | USP13 | GUUACAGCCAGGAGAGGAA | NM_003940 |
| 2821 | USP13 | GCACUGGAUUGGAUCUUUA | NM_003940 |
| 2822 | USP13 | GGAAGAUGGCUGCAGGAGA | NM_003940 |
| 2823 | USP13 | UGAACUAACGAGAAGGGAA | NM_003940 |
| 2824 | USP13 | GAAGAUGGGUGAUUUACAA | NM_003940 |
| 2825 | USP13 | AGGAGGAAUUCCAAGAUUU | NM_003940 |
| 2826 | USP13 | CAGAGGAAAUCGUAGCUAU | NM_003940 |
| 2827 | USP13 | GCUUAUGAACUAACGAGAA | NM_003940 |
| 2828 | USP13 | GGAAGGAAGAUGGGUGAUU | NM_003940 |
| 2829 | USP14 | GGAGAAAUUUGAAGGUGUA | NM_005151 |
| 2830 | USP14 | GGAUUAAGUUUGAUGAUGA | NM_005151 |
| 2831 | USP14 | UGAAAUAAUGGAAGAGGAA | NM_005151 |
| 2832 | USP14 | GAAACAAGAUGAAUGGAUU | NM_005151 |
| 2833 | USP14 | AGAGGAAAGUGAACAGUAA | NM_005151 |
| 2834 | USP14 | GGUGAAAGGAGGAACGCUA | NM_005151 |
| 2835 | USP14 | GCCAAAUACAAGUGACAAA | NM_005151 |
| 2836 | USP14 | GAGUAUUGCAACAGAAAUU | NM_005151 |
| 2837 | USP14 | ACCAGAACUUCAAGAGAAA | NM_005151 |
| 2838 | USP14 | CCAGAAAGAAGUUAAGUAU | NM_005151 |
| 2839 | USP14 | GAGUUGAAAUAAUGGAAGA | NM_005151 |
| 2840 | USP14 | ACAGAAAGUUAUGGUGAAA | NM_005151 |
| 2841 | USP14 | CAACAGAAAUUGGAAGCAA | NM_005151 |
| 2842 | USP14 | CGAGAAAGGUGAACAAGGA | NM_005151 |
| 2843 | USP14 | AUCCAGAGCUUUAGAGGAA | NM_005151 |
| 2844 | USP14 | AGAAGAACCCUCAGCCAAA | NM_005151 |
| 2845 | USP14 | GAGGAACGCUAAAGGAUGA | NM_005151 |
| 2846 | USP14 | CACCAGAACUUCAAGAGAA | NM_005151 |
| 2847 | USP14 | GACAGAAAGUUAUGGUGAA | NM_005151 |
| 2848 | USP14 | GCUGAAGACAUGUUUAAUA | NM_005151 |
| 2849 | USP14 | GCUAAUGAAUGUUGGAUAC | NM_005151 |
| 2850 | USP14 | GCAAAGAAAUGCCUUGUAU | NM_005151 |
| 2851 | USP14 | CAUGAAAUGUACAGAAUCU | NM_005151 |
| 2852 | USP14 | GAAAUUUGAAGGUGUAGAA | NM_005151 |
| 2853 | USP14 | GCAGGUGCCUUGAGAGCUU | NM_005151 |
| 2854 | USP14 | CCAAAGUUCUUAAGGAUGU | NM_005151 |
| 2855 | USP14 | UCUAUAAUCCAGAGCUUUA | NM_005151 |
| 2856 | USP14 | GCGAGUAUUGCAACAGAAA | NM_005151 |
| 2857 | USP14 | CUUGAGAGCUUCAGGGGAA | NM_005151 |
| 2858 | USP14 | GGAUACAAAUGAUGCGAGU | NM_005151 |
| 2859 | USP15 | GGAACAAAUACAUGAGUAA | NM_006313 |
| 2860 | USP15 | GCAGAUAAGAUGAUAGUUA | NM_006313 |
| 2861 | USP15 | AGGAAUGAGAGGUGAAAUA | NM_006313 |
| 2862 | USP15 | GCAUAAACACCUUGAAUUU | NM_006313 |
| 2863 | USP15 | GAAUUGAAGCUAUGUGAAA | NM_006313 |
| 2864 | USP15 | AUGAAAGUGUGGAGUAUAA | NM_006313 |
| 2865 | USP15 | GAUUUUAACUUGUGCAGUA | NM_006313 |
| 2866 | USP15 | GGAAACAGGUUCUAGAUUU | NM_006313 |
| 2867 | USP15 | ACAAAUACCAGAUGGGAGA | NM_006313 |
| 2868 | USP15 | CAUUUGAACCACUGAAUAA | NM_006313 |
| 2869 | USP15 | GAAACAAUACUGAAGACAA | NM_006313 |
| 2870 | USP15 | UAGCAAAGCUGACACAAUA | NM_006313 |
| 2871 | USP15 | GAUGUGAGUUGAUGACAAA | NM_006313 |
| 2872 | USP15 | CUGCAAAGUAGAAGUAUAU | NM_006313 |
| 2873 | USP15 | GGAGAUAAUGAUUCUGAAA | NM_006313 |
| 2874 | USP15 | AUACAGAGCACGUGAUUAU | NM_006313 |
| 2875 | USP15 | ACACAUUGAUGGAAGGUCA | NM_006313 |
| 2876 | USP15 | ACUGCAAAGUAGAAGUAUA | NM_006313 |
| 2877 | USP15 | CCUGUUUGCCUAAGAGAAA | NM_006313 |
| 2878 | USP15 | GAUGGAAGGUCAAGAGCCA | NM_006313 |
| 2879 | USP15 | GAGACCAGAUUGUGGAACA | NM_006313 |
| 2880 | USP15 | UGUUGUAACUCGAAGAUUU | NM_006313 |
| 2881 | USP15 | AAGCAAAUGUGGUCUGGAA | NM_006313 |
| 2882 | USP15 | ACAAUUGGCUAUAAAGGUA | NM_006313 |
| 2883 | USP15 | UCAGAUAACCGAAUGUAAA | NM_006313 |
| 2884 | USP15 | GAAUAUUCGCUAUGGAUGA | NM_006313 |
| 2885 | USP15 | GCAGAUGGAAGGCCAGAUA | NM_006313 |
| 2886 | USP15 | AGGACAGGUAUUAGUGAUA | NM_006313 |
| 2887 | USP15 | UCAGCAAGCCACAAAGAAA | NM_006313 |
| 2888 | USP15 | CCGAACUGAUCAAGCAAAU | NM_006313 |
| 2889 | USP16 | AGAUAAAGCUGAAGAAGAA | NM_006447 |
| 2890 | USP16 | GGAACAAGGUAAUUUGAAA | NM_006447 |
| 2891 | USP16 | AAACAUGGCUAAAGAGAAU | NM_006447 |
| 2892 | USP16 | AGAUCAAGAUAGUGAGGAA | NM_006447 |
| 2893 | USP16 | CAGAGAAAGAUAAUGGAAA | NM_006447 |
| 2894 | USP16 | AAGAGUGAGUAAAGGAAUA | NM_006447 |
| 2895 | USP16 | CCACAGAGGAAGUAGAUAU | NM_006447 |
| 2896 | USP16 | AGAAUGAACAAGAGAGAGA | NM_006447 |
| 2897 | USP16 | UGAUCAGAGUGGUAAGAAA | NM_006447 |
| 2898 | USP16 | CAUCUUUGGUGGUGAACUA | NM_006447 |
| 2899 | USP16 | AGAAACGGACAAAGGGAAA | NM_006447 |
| 2900 | USP16 | GUUCAAACCAGUUGGGUCA | NM_006447 |
| 2901 | USP16 | GACCAAAGGCAAAUAUAAA | NM_006447 |
| 2902 | USP16 | GGACCAAAGGCAAAUAUAA | NM_006447 |
| 2903 | USP16 | GGAUGAAGAUCAAGAUAGU | NM_006447 |
| 2904 | USP16 | UGAAGAAGAAACAGAAGAA | NM_006447 |
| 2905 | USP16 | GUAAUGGACCAAAGGCAAA | NM_006447 |
| 2906 | USP16 | GUGAAUGUGGAAUGGAAUA | NM_006447 |
| 2907 | USP16 | UAAGAAUGUUGCAGAAGAA | NM_006447 |
| 2908 | USP16 | AGUGAAAGAUAAAGCUGAA | NM_006447 |
| 2909 | USP16 | GAACAAAGGUGUAUGAGGU | NM_006447 |
| 2910 | USP16 | GAACCAACGAAGACAACAA | NM_006447 |
| 2911 | USP16 | GUGAAAGGACUCAGUAAUU | NM_006447 |
| 2912 | USP16 | CAGAGGAAGUAGAUAUGAA | NM_006447 |
| 2913 | USP16 | GGAAGGGAGCAAUGGAGAA | NM_006447 |
| 2914 | USP16 | AAGAUAAAGCUGAAGAAGA | NM_006447 |
| 2915 | USP16 | AGAGAGAAAAGAAGGAAAA | NM_006447 |
| 2916 | USP16 | GAAAGAUAAAGCUGAAGAA | NM_006447 |
| 2917 | USP16 | CGAAUAAACUGCUUUGUGA | NM_006447 |
| 2918 | USP16 | CUGUAAGACUGACAAUAAA | NM_006447 |
| 2919 | USP18 | GAAGAAGACCCGUGGGAAA | NM_017414 |
| 2920 | USP18 | GGACAGACCUGCUGCCUUA | NM_017414 |
| 2921 | USP18 | CUGCAUAUCUUCUGGUUUA | NM_017414 |
| 2922 | USP18 | ACAUGAAGAUGGAGUGCUA | NM_017414 |
| 2923 | USP18 | CCAUAUGAAUCAAGUGUUU | NM_017414 |
| 2924 | USP18 | GCAUGGCGCUUGAGAGAUU | NM_017414 |
| 2925 | USP18 | GGAAUGCUGUGGAUGGAAA | NM_017414 |
| 2926 | USP18 | UCCAUAAGAUAGUGUGAUA | NM_017414 |
| 2927 | USP18 | AGAAGGAAGAAGACAGCAA | NM_017414 |
| 2928 | USP18 | GGAAACAGGUCUUGAAGCU | NM_017414 |
| 2929 | USP18 | GGAAUUCACAGACGAGAAA | NM_017414 |
| 2930 | USP18 | UAAACACGGUCAUGAAUAA | NM_017414 |
| 2931 | USP18 | CCCAAAACCUUCAGAGAUU | NM_017414 |
| 2932 | USP18 | GGAAAAUGGUCUUGCUUCA | NM_017414 |
| 2933 | USP18 | ACAGCAACAUGAAGAGAGA | NM_017414 |
| 2934 | USP18 | GGGAAGACAUCCAGUGUAC | NM_017414 |
| 2935 | USP18 | GACAUUAGCCCUUUAGUUA | NM_017414 |
| 2936 | USP18 | GGAAAAUGGUUCUGCUUCA | NM_017414 |
| 2937 | USP18 | GCUGACGAGCAGAGGAGAA | NM_017414 |
| 2938 | USP18 | AAGAAAAGAAGGAAGAAGA | NM_017414 |
| 2939 | USP18 | CCAGGAUAUUGAAGAGGAU | NM_017414 |
| 2940 | USP18 | UGAUAAACACGGUCAUGAA | NM_017414 |
| 2941 | USP18 | CCAACAUGAUGCUGCCCAA | NM_017414 |
| 2942 | USP18 | GGAGAAGCAUUGUUUUCAA | NM_017414 |
| 2943 | USP18 | CCAGGGAGUUAUCAAGCAA | NM_017414 |
| 2944 | USP18 | AGGAAUUCACAGACGAGAA | NM_017414 |
| 2945 | USP18 | GGGAAGAAGACCCGUGGGA | NM_017414 |
| 2946 | USP18 | GAGAAGCAUUGUUUUCAAA | NM_017414 |
| 2947 | USP18 | UCGUAAUGAAUGUGGACUU | NM_017414 |
| 2948 | USP18 | AGGAUAUUGAAGAGGAUCA | NM_017414 |
| 2949 | USP2 | CGACAGAUGUGGAGAAAAU | NM_004205 |
| 2950 | USP2 | CUGAAUACCUGGUCGACUA | NM_004205 |
| 2951 | USP2 | AGACCCAGAUCCAGAGAUA | NM_004205 |
| 2952 | USP2 | UCGACUACCUGGAGAACUA | NM_004205 |
| 2953 | USP2 | CCAAAGAGGAUGUGCUUGA | NM_004205 |
| 2954 | USP2 | GAAGGGACAUCUUUGGAAA | NM_004205 |
| 2955 | USP2 | GGGAAGAGACGGCAUGAAU | NM_004205 |
| 2956 | USP2 | ACACAAACCUGACAAGAGA | NM_004205 |
| 2957 | USP2 | CGAGAAAGGCCGACAGAUG | NM_004205 |
| 2958 | USP2 | CUGCAGUGCCUGAGCAACA | NM_004205 |
| 2959 | USP2 | GCAUGAGGCUCUUCACCAA | NM_171997 |
| 2960 | USP2 | ACACAGCCCUCGUGGAAGA | NM_004205 |
| 2961 | USP2 | GACCUGGACUUAAGAGAAU | NM_004205 |
| 2962 | USP2 | GGAAGAGACGGCAUGAAUU | NM_004205 |
| 2963 | USP2 | AGGAUGUGCUUGAUGGAGA | NM_171997 |
| 2964 | USP2 | CGGCAUGAAUUCUAAGAGU | NM_004205 |
| 2965 | USP2 | CUGAAGCGCUACACAGAAU | NM_004205 |
| 2966 | USP2 | GAAAAUAUCUAGAACGGGA | NM_004205 |
| 2967 | USP2 | UCGCUGACGUGUACAGAUU | NM_004205 |
| 2968 | USP2 | UGACAUUAAUGGACUGCAU | NM_004205 |
| 2969 | USP2 | ACAAACCUGACAAGAGAAA | NM_004205 |
| 2970 | USP2 | GGCAGAAAACGGUGUAUAA | NM_004205 |
| 2971 | USP2 | UAACUAAAGUGUUCAGACU | NM_004205 |
| 2972 | USP2 | CAUCUGAGUUCAAGACCCA | NM_004205 |
| 2973 | USP2 | GCCGACAGAUGUGGAGAAA | NM_004205 |
| 2974 | USP2 | GGAUGUGCUUGAUGGAGAU | NM_004205 |
| 2975 | USP2 | ACACACAGCCCUCGUGGAA | NM_171997 |
| 2976 | USP2 | AGAAAACGGUGUAUAAAGA | NM_171997 |
| 2977 | USP2 | CGAGGUGAACCGAGUGACA | NM_171997 |
| 2978 | USP2 | UCAACAAAGCCAAGAAUUC | NM_171997 |
| 2979 | USP20 | GGACAAUGAUGCUCACCUA | NM_006676 |
| 2980 | USP20 | CUGAUGAGUUAAAGGGUGA | NM_006676 |
| 2981 | USP20 | GGUCAAAGGAAGCGGCCAU | NM_006676 |
| 2982 | USP20 | CCAUAGGAGAGGUGACCAA | NM_006676 |
| 2983 | USP20 | UCAAGAAAGCCCAGGUAUU | NM_006676 |
| 2984 | USP20 | GGGAGUAGCUGCUGCUUCA | NM_006676 |
| 2985 | USP20 | GUACAAACUCGGAGCAAGU | NM_006676 |
| 2986 | USP20 | GAAAGGAGGACCUGGCCAA | NM_006676 |
| 2987 | USP20 | AGUUAAAGGGUGACAACAU | NM_006676 |
| 2988 | USP20 | AUGAGAAACGGGAGGGUGA | NM_006676 |
| 2989 | USP20 | GAGUGACACGGAUGAGAAA | NM_006676 |
| 2990 | USP20 | GCAUGAAGAACCUCGGGAA | NM_006676 |
| 2991 | USP20 | CGCCAGAGCCGGACAAUGA | NM_006676 |
| 2992 | USP20 | CGUCGUACGUGCUCAAGAA | NM_006676 |
| 2993 | USP20 | GGUGUAAGAAGCUGCGGAA | NM_006676 |
| 2994 | USP20 | GGUACGAGUUUGAUGACCA | NM_006676 |
| 2995 | USP20 | UGCAGAACGCCGAGGGCUA | NM_006676 |
| 2996 | USP20 | GGGCAGAUUUCGGAGGAGA | NM_006676 |
| 2997 | USP20 | GUAAAGAGGCAGAAAAGUU | NM_006676 |
| 2998 | USP20 | CCUGUGAGAAGGAGGUAUU | NM_006676 |
| 2999 | USP20 | GGAACCGGAUGAUGAAACA | NM_006676 |
| 3000 | USP20 | GGACCAAACCUAUGGGCCU | NM_006676 |
| 3001 | USP20 | CCAUUCAUGCACAGGCAAA | NM_006676 |
| 3002 | USP20 | UCUGAAAGCUGUUCCUAUU | NM_006676 |
| 3003 | USP20 | AAGCACAACUUGACCGUGA | NM_006676 |
| 3004 | USP20 | ACGAGACGGUGGUGCAGAA | NM_006676 |
| 3005 | USP20 | CUGCUCAAAUCUAAGGGAA | NM_006676 |
| 3006 | USP20 | GAGCUGAUGCUAAAGAAGA | NM_006676 |
| 3007 | USP20 | CGAGUGACACGGAUGAGAA | NM_006676 |
| 3008 | USP20 | UCUCUGAGGUCUGGCAUAA | NM_006676 |
| 3009 | USP21 | GCUAGAAGAACCUGAGUUA | NM_012475 |
| 3010 | USP21 | GAGCUGUCUUCCAGAAAUA | NM_012475 |
| 3011 | USP21 | GAGCCAACCUAAUGUGGAA | NM_016572 |
| 3012 | USP21 | GUGCCAGGCCUGUGGGUAU | NM_012475 |
| 3013 | USP21 | AAGAAGAGCUAGAGUCGGA | NM_016572 |
| 3014 | USP21 | GUUUCAACCUUUUCACUAA | NM_012475 |
| 3015 | USP21 | GGUUGUAGCUCCAUUAUUU | NM_016572 |
| 3016 | USP21 | CACUAAGGAAGAAGAGCUA | NM_012475 |
| 3017 | USP21 | CUAAGGAAGAAGAGCUAGA | NM_016572 |
| 3018 | USP21 | CGGCAGAAAACUCGAAGUA | NM_012475 |
| 3019 | USP21 | GUACAAAGAUUCCCUCGAA | NM_012475 |
| 3020 | USP21 | UGAUGAACGGCUCAAGAAA | NM_012475 |
| 3021 | USP21 | CCACCCACUUUGAGACGUA | NM_012475 |
| 3022 | USP21 | GCGAGAGGACAGCAAGAUU | NM_016572 |
| 3023 | USP21 | CUGUGAAGCCCUUUAAACA | NM_012475 |
| 3024 | USP21 | GUUAAGUGAUGAUGACCGA | NM_016572 |
| 3025 | USP21 | GAGCGAGAGGACAGCAAGA | NM_012475 |
| 3026 | USP21 | CCUCAGAGACGUCUAUUUU | NM_012475 |
| 3027 | USP21 | GCAGCAAGGAGCGCAGAAA | NM_012475 |
| 3028 | USP21 | GCGCAGAAACCCAGCCUCU | NM_012475 |
| 3029 | USP21 | UAGAAGAACCUGAGUUAAG | NM_012475 |
| 3030 | USP21 | CUUCGAAACCUGGGAAACA | NM_012475 |
| 3031 | USP21 | GAACCUGAGUUAAGUGAUG | NM_012475 |
| 3032 | USP21 | UGGCAUCCAGCGAGGGCUA | NM_012475 |
| 3033 | USP21 | AGUUGACAGUACAAAGAUU | NM_016572 |
| 3034 | USP21 | UUCAGUAGGUGUAGACUUU | NM_016572 |
| 3035 | USP21 | GCAGGAUGCCCAAGAGUUC | NM_012475 |
| 3036 | USP21 | CGGGAUUGUUUCAACCUUU | NM_016572 |
| 3037 | USP21 | CUGAUGAACGGCUCAAGAA | NM_016572 |
| 3038 | USP21 | AUGAACGGCUCAAGAAACU | NM_016572 |
| 3039 | USP22 | CUGCAAAGGUGAUGACAAU | XM_042698 |
| 3040 | USP22 | CCAAGGAGGAGCAGCGAAA | XM_042698 |
| 3041 | USP22 | UGACAAAGACAUGGAAAUA | XM_042698 |
| 3042 | USP22 | GGACUACAUCUAUGACAAA | XM_042698 |
| 3043 | USP22 | CCACAAAGCAGCUCACUAU | XM_042698 |
| 3044 | USP22 | CAGCGAAAAGCUUGGAAAA | XM_042698 |
| 3045 | USP22 | GCAAACCGGUUCAGUGCUA | XM_042698 |
| 3046 | USP22 | AUGACAAAGACAUGGAAAU | XM_042698 |
| 3047 | USP22 | GCGAGGGCAACGUGGUAAA | XM_042698 |
| 3048 | USP22 | AGGACUACAUCUAUGACAA | XM_042698 |
| 3049 | USP22 | CAACAAUGACAACAAGUAU | XM_042698 |
| 3050 | USP22 | ACUGAGAGCCUAUGACAAU | XM_042698 |
| 3051 | USP22 | CAACCAAACGGGAGCUUGA | XM_042698 |
| 3052 | USP22 | CCGAAAAGGAGAAAGAUCA | XM_042698 |
| 3053 | USP22 | GGAGAAAGAUCACCUCGAA | XM_042698 |
| 3054 | USP22 | GUGGACAACUGGAAGCAGA | XM_042698 |
| 3055 | USP22 | AGCAAAGAGAGCAGGAUGA | XM_042698 |
| 3056 | USP22 | GCAAAGAGAGCAGGAUGAA | XM_042698 |
| 3057 | USP22 | GCAGCAGCGCCAAGAUCAA | XM_042698 |
| 3058 | USP22 | GACAAAGACAUGGAAAUAA | XM_042698 |
| 3059 | USP22 | UCACAAAGAAGCAUAUUCA | XM_042698 |
| 3060 | USP22 | CGGACAGUCUCAACAAUGA | XM_042698 |
| 3061 | USP22 | GCAAGGCGUUGGAGAGAAG | XM_042698 |
| 3062 | USP22 | GCAGCUUCAAGGUGGACAA | XM_042698 |
| 3063 | USP22 | CCUCACUGUUUCAGGAGUU | XM_042698 |
| 3064 | USP22 | AAAUAAUCGCCAAGGAGGA | XM_042698 |
| 3065 | USP22 | GCAUCAUAGACCAGAUCUU | XM_042698 |
| 3066 | USP22 | UCAACAAUGACAACAAGUA | XM_042698 |
| 3067 | USP22 | GAAGCAUAUUCACGAGCAU | XM_042698 |
| 3068 | USP22 | GAGCGAGGGCAACGUGGUA | XM_042698 |
| 3069 | USP24 | CCAACUACUUCAUGAAAUA | XM_165973 |
| 3070 | USP24 | CCUCAUGAGUUAAAGAAUA | XM_165973 |
| 3071 | USP24 | CUAUAGAGGCUCACAGUAA | XM_165973 |
| 3072 | USP24 | UGACACAGUUAUAGAAGAA | XM_165973 |
| 3073 | USP24 | GAACAAAUCCUUACAGUGA | XM_165973 |
| 3074 | USP24 | GAAUGUUGCUCCUGGCAUA | XM_165973 |
| 3075 | USP24 | GGACGAGAAUUGAUAAAGA | XM_165973 |
| 3076 | USP24 | GAGAUUACUUGGCUGGAUA | XM_165973 |
| 3077 | USP24 | GAGAACAGCAGGAUGCAUA | XM_165973 |
| 3078 | USP24 | GCCAAAUCCUUCUGUGAAA | XM_165973 |
| 3079 | USP24 | GGGAGUAGCCAGCCAAUUA | XM_165973 |
| 3080 | USP24 | GGAUGAAUACCUCAAGAAA | XM_165973 |
| 3081 | USP24 | AAAGCAAGCUGCAGUACUA | XM_165973 |
| 3082 | USP24 | GAAAAUGCCUGCUCGAAUA | XM_165973 |
| 3083 | USP24 | CUACGAUGCUUGAAGAUGA | XM_165973 |
| 3084 | USP24 | GAAUAGAGAUGUAUACAGU | XM_165973 |
| 3085 | USP24 | AGAAGAAGAUGUCAGAACA | XM_165973 |
| 3086 | USP24 | GGAAAUGCUUGGUUCAUCA | XM_165973 |
| 3087 | USP24 | GGGAAUCUGUGUUCGACAA | XM_165973 |
| 3088 | USP24 | CAACUUGAUUCUUUAGGAA | XM_165973 |
| 3089 | USP24 | UUGAUCAGAUGGAUGAAUA | XM_165973 |
| 3090 | USP24 | UGACAGUAAUGAAACCAUA | XM_165973 |
| 3091 | USP24 | GUUCUAAGCUCCAAACUCA | XM_165973 |
| 3092 | USP24 | CGAAACAGACUCAGCAGUU | XM_165973 |
| 3093 | USP24 | GAAAAGGACCUGUAUUAAA | XM_165973 |
| 3094 | USP24 | AAACAAACCCAUACACUGA | XM_165973 |
| 3095 | USP24 | GAAAAGAGAAUAACAGUGA | XM_165973 |
| 3096 | USP24 | AGGGAAACCUUACCUGUUA | XM_165973 |
| 3097 | USP24 | CCACAGCUUUGUUGAAUGA | XM_165973 |
| 3098 | USP24 | UUACCAAGGAGUUUGAUUA | XM_165973 |
| 3099 | USP25 | GCACAGAAACAGAGAAAUA | NM_013396 |
| 3100 | USP25 | UGGAAUAACUGAUGAGGAA | NM_013396 |
| 3101 | USP25 | GGGAAGAGCUAGUGAGGGA | NM_013396 |
| 3102 | USP25 | GGGAGUACUUGAAGGUAAA | NM_013396 |
| 3103 | USP25 | CUGUAGAAGAUAUGAGAAA | NM_013396 |
| 3104 | USP25 | GGGAAGAGAUCAAGAGACU | NM_013396 |
| 3105 | USP25 | GCUAAAGAAUGUUGGCAAU | NM_013396 |
| 3106 | USP25 | GAAAGUUGCUCAAGCCAAA | NM_013396 |
| 3107 | USP25 | GAUAAAACCUGAAGAAGUA | NM_013396 |
| 3108 | USP25 | AACAAAGGCUAGAAAGAUA | NM_013396 |
| 3109 | USP25 | GGCAAUACUUGUUGGUUUA | NM_013396 |
| 3110 | USP25 | UAUAGGAAAUUCAGGGAAA | NM_013396 |
| 3111 | USP2S | CAUCAGGAUUAUAGGAAAU | NM_013396 |
| 3112 | USP25 | CAUUAUUACUGGUGGAUGA | NM_013396 |
| 3113 | USP25 | CAGAAAGCUUUGCAGGAAA | NM_013396 |
| 3114 | USP25 | ACAGAUACAUGCACAGAAA | NM_013396 |
| 3115 | USP25 | GCAGAUGGAUGAAGUACAA | NM_013396 |
| 3116 | USP25 | GCAUCAGGAUUAUAGGAAA | NM_013396 |
| 3117 | USP25 | GGACAGAAAUAGAAAAUGA | NM_013396 |
| 3118 | USP25 | CCAGCAUAGCAGAGAAUAA | NM_013396 |
| 3119 | USP25 | GGUAAAUCCAGGAGUGUAU | NM_013396 |
| 3120 | USP25 | UGGAGAGGAUCGAGAAGUA | NM_013396 |
| 3121 | USP25 | UGGGAGUACUUGAAGGUAA | NM_013396 |
| 3122 | USP25 | CCACCGGAUUUGAGAGAUU | NM_013396 |
| 3123 | USP25 | CGUGAAAGCAGAUGGAUGA | NM_013396 |
| 3124 | USP25 | GAGCAUUGGUUUACUGAAU | NM_013396 |
| 3125 | USP25 | GGAAUUUGCCUCAAGUAAA | NM_013396 |
| 3126 | USP25 | AGGCAAUUAAGUUGGAAUA | NM_013396 |
| 3127 | USP25 | GAACCAGGCACCAAAGAAA | NM_013396 |
| 3128 | USP25 | GAGCAAUUGCCUUGAGUUU | NM_013396 |
| 3129 | USP26 | CCACAAAGCUGGAGGUAAA | NM_031907 |
| 3130 | USP26 | CCACAAAGUUGAUGAGAAA | NM_031907 |
| 3131 | USP26 | CAGAAGAGCUUGAGUAUAA | NM_031907 |
| 3132 | USP26 | AAGCUAUAAUCGAGAGAAA | NM_031907 |
| 3133 | USP26 | ACAAAGGAAUCCAAAGAUA | NM_031907 |
| 3134 | USP26 | GAACGAUGCUCAUGAGUUU | NM_031907 |
| 3135 | USP26 | GAGUGAGGAUGGAGAAAUU | NM_031907 |
| 3136 | USP26 | GGUUACACAAAGUGGGAUA | NM_031907 |
| 3137 | USP26 | UAUCAGAAUUCCAGAAAGA | NM_031907 |
| 3138 | USP26 | GCACAACACAGAAGGAAAU | NM_031907 |
| 3139 | USP26 | CCUAUGACUUUGAGAAACA | NM_031907 |
| 3140 | USP26 | GCAAAAGUACCUUGGAAAA | NM_031907 |
| 3141 | USP26 | ACACAAAGUGGGAUAAAUU | NM_031907 |
| 3142 | USP26 | CAGCACAAGAAGAGGAAAA | NM_031907 |
| 3143 | USP26 | CCAAUAAGAAUCCAAGAAA | NM_031907 |
| 3144 | USP26 | CCACAGAUGCUGAACAAUU | NM_031907 |
| 3145 | USP26 | GCUAUAAUCGAGAGAAACA | NM_031907 |
| 3146 | USP26 | UUGAAGCAGUGGAAAGAAA | NM_031907 |
| 3147 | USP26 | CCUAAGACCUACAAAAUUA | NM_031907 |
| 3148 | USP26 | CUGAAAGAUAACAUGGAAA | NM_031907 |
| 3149 | USP26 | CAGAGAUGAAUGAGGAAUU | NM_031907 |
| 3150 | USP26 | GAGAAAUCAAGUAGCAAAU | NM_031907 |
| 3151 | USP26 | GAAAUGAUGAUAAGGGAGA | NM_031907 |
| 3152 | USP26 | GAGAGAAACAAUUGAAGUU | NM_031907 |
| 3153 | USP26 | UGGAAAGAAAGAAGAAAGA | NM_031907 |
| 3154 | USP26 | CAACAAAGGAAUCCAAAGA | NM_031907 |
| 3155 | USP26 | CUGUUUAGAUCAACUGAAA | NM_031907 |
| 3156 | USP26 | GAGCAGAAGAGCUUGAGUA | NM_031907 |
| 3157 | USP26 | CCGAAAAUCCAAAACGAAA | NM_031907 |
| 3158 | USP26 | GCAGAAGACAGCAGCAAAA | NM_031907 |
| 3159 | USP28 | GGGAAGAAGUUGAAAGAGA | NM_020886 |
| 3160 | USP28 | CCAUUGAGGUCAUGAGAAA | NM_020886 |
| 3161 | USP28 | GGACAAGAGCGUUGGUUUA | NM_020886 |
| 3162 | USP28 | UGGAAAGGUAUGUGAAAUA | NM_020886 |
| 3163 | USP28 | UCACAGAUGAGGAGAUAAA | NM_020886 |
| 3164 | USP28 | AAGCGAAACUGAAGGAAAU | NM_020886 |
| 3165 | USP28 | GCAAGGAGCUUAUUCGAAA | NM_020886 |
| 3166 | USP28 | GGCAAUACAUGUUGGUUUA | NM_020886 |
| 3167 | USP28 | GGAACAGUUUGCAGAUAAA | NM_020886 |
| 3168 | USP28 | GAAGGUGGCUCAAGCGAAA | NM_020886 |
| 3169 | USP28 | GAAAUAAGAGAGAGUGUAU | NM_020886 |
| 3170 | USP28 | CUGUGGAACUCAAGCAUUA | NM_020886 |
| 3171 | USP28 | GAAAGUUGAAGGAGGAAAU | NM_020886 |
| 3172 | USP28 | GGAAGAAGUUGAAAGAGAU | NM_020886 |
| 3173 | USP28 | GGCAGAAAGCAGUGUAUUA | NM_020886 |
| 3174 | USP28 | AGUUGAAGGAGGAAAUAAA | NM_020886 |
| 3175 | USP28 | GACCAGACAUCCAAGGAAA | NM_020886 |
| 3176 | USP28 | ACAAGGAAGUAUUAGCAAA | NM_020886 |
| 3177 | USP28 | AGAAGUGGCAUGAAGAUUA | NM_020886 |
| 3178 | USP28 | GAGAGAAAUCACAGGCAUU | NM_020886 |
| 3179 | USP28 | UGUCGAAGUCAUACAGAAA | NM_020886 |
| 3180 | USP28 | CAAGCGAAACUGAAGGAAA | NM_020886 |
| 3181 | USP28 | CAGCAAGAUGUGAGUGAAU | NM_020886 |
| 3182 | USP28 | UGGAACAGUUUGCAGAUAA | NM_020886 |
| 3183 | USP28 | GAUUAUAGUUUGUUCCGAA | NM_020886 |
| 3184 | USP28 | UGAAUAUGGAAGAGUACAA | NM_020886 |
| 3185 | USP28 | CUAAACGCUCAAAGAGAAA | NM_020886 |
| 3186 | USP28 | GGAGUGAGAUUGAACAAGA | NM_020886 |
| 3187 | USP28 | AAUUCAAGCUGAUGGAAGA | NM_020886 |
| 3188 | USP28 | GCAACUUAGACGAGUGUUU | NM_020886 |
| 3189 | USP29 | GUACAAAGAUCAAGAGAGA | NM_020903 |
| 3190 | USP29 | GGAAUAUGCUGAAGGAAAU | NM_020903 |
| 3191 | USP29 | AGGAAUAUGCUGAAGGAAA | NM_020903 |
| 3192 | USP29 | AGACAGAUUCCUUGAAAUA | NM_020903 |
| 3193 | USP29 | ACAAAGAUCAAGAGAGAAU | NM_020903 |
| 3194 | USP29 | AUACAAAGCAAUAGGAAGA | NM_020903 |
| 3195 | USP29 | CCAAGGAACUAACAAGAAA | NM_020903 |
| 3196 | USP29 | CAUCAAGUUUAGAGGAUUU | NM_020903 |
| 3197 | USP29 | CAUGAAAGUUUGAAGAACA | NM_020903 |
| 3198 | USP29 | GGAUGAAAUCUCAAUGAAA | NM_020903 |
| 3199 | USP29 | UGAAAGAAGACAUGGAAAA | NM_020903 |
| 3200 | USP29 | GAUGAUAUCUCUAAAGGUA | NM_020903 |
| 3201 | USP29 | CAAUCAGUCUACAGAAUUA | NM_020903 |
| 3202 | USP29 | GGUGAAGAAUAACGAGCAA | NM_020903 |
| 3203 | USP29 | GUGCAAAGACAAAAGGAAA | NM_020903 |
| 3204 | USP29 | UUGAGGAGCUGUUAAGAAA | NM_020903 |
| 3205 | USP29 | GCUAGGGACUGAUUAGAAA | NM_020903 |
| 3206 | USP29 | GCUGAAGGAAAUUGACAAA | NM_020903 |
| 3207 | USP29 | GAAACAGUGCAAAGACAAA | NM_020903 |
| 3208 | USP29 | GGUUGCUGGUGAAGAAUAA | NM_020903 |
| 3209 | USP29 | AAGAAGAAGAGCUUGAAUA | NM_020903 |
| 3210 | USP29 | UUGUAAAGCUUGUGGUCAU | NM_020903 |
| 3211 | USP29 | AGAAGAAGAGCUUGAAUAU | NM_020903 |
| 3212 | USP29 | GAGAGAAUUACUUGGGAAU | NM_020903 |
| 3213 | USP29 | GUAUGAAGAUGGAGGGAAG | NM_020903 |
| 3214 | USP29 | CUUUAAAGAAGAAGAGCUU | NM_020903 |
| 3215 | USP29 | CCAGAGAGACUGUGGAGAU | NM_020903 |
| 3216 | USP29 | CAGAAGAUGCCUUUGUUUA | NM_020903 |
| 3217 | USP29 | CUGAAAGAAGACAUGGAAA | NM_020903 |
| 3218 | USP29 | GGAAAAUGGCUCUGCACUA | NM_020903 |
| 3219 | USP3 | GUAGAAGAGUUUAGAAAGA | NM_006537 |
| 3220 | USP3 | GGAGUUAAGGAAUGGGAAA | NM_006537 |
| 3221 | USP3 | GUGAUGAUUUUGUGGUUAA | NM_006537 |
| 3222 | USP3 | UGGUAGAAGAGUUUAGAAA | NM_006537 |
| 3223 | USP3 | GGACAGCAUAUUUAAGAAA | NM_006537 |
| 3224 | USP3 | AGAAGAACUUGAUGAGACA | NM_006537 |
| 3225 | USP3 | GGGACAGAAUCUAGAAAGU | NM_006537 |
| 3226 | USP3 | CACAAUGACUGCUGAGGAA | NM_006537 |
| 3227 | USP3 | UAACAAAGGGCAUCAUUAA | NM_006537 |
| 3228 | USP3 | CCAAGUCAGUUCAGAAGUA | NM_006537 |
| 3229 | USP3 | CCACAAAAUUUCACAAUGA | NM_006537 |
| 3230 | USP3 | GGCCAAAGCUGGAUCGGAU | NM_006537 |
| 3231 | USP3 | CUAGAAAGUUUGAUCCAUU | NM_006537 |
| 3232 | USP3 | GACAGAAUCUAGAAAGUUU | NM_006537 |
| 3233 | USP3 | GAGAACACUUACAGAACUU | NM_006537 |
| 3234 | USP3 | GCUCUAAGAAUCAAGAAAA | NM_006537 |
| 3235 | USP3 | ACUCAACACUAAACAGCAA | NM_006537 |
| 3236 | USP3 | GGCUAUAUUCGGAGGCAUU | NM_006537 |
| 3237 | USP3 | AGACUGUGGUGAAGGCGAA | NM_006537 |
| 3238 | USP3 | CCAUGAAUUCAAUGCGCUA | NM_006537 |
| 3239 | USP3 | GGGAUAACAAUGUGUCUUU | NM_006537 |
| 3240 | USP3 | AGAAGAGUUUAGAAAGACA | NM_006537 |
| 3241 | USP3 | UUGCAUAAAUGGAGCAUCU | NM_006537 |
| 3242 | USP3 | ACGAGGAGACUGUGGUGAA | NM_006537 |
| 3243 | USP3 | GUACAGAAAGUCAGAGAAC | NM_006537 |
| 3244 | USP3 | UUGAUGAGACAGAGUUAUA | NM_006537 |
| 3245 | USP3 | GCUGAAAGCAAGAUGUGUU | NM_006537 |
| 3246 | USP3 | ACACUAAACAGCAAGUUAU | NM_006537 |
| 3247 | USP3 | CCAAAGCUGGAUCGGAUAA | NM_006537 |
| 3248 | USP3 | CGUAGAAUUUCCACUGAGA | NM_006537 |
| 3249 | USP30 | GUACAAAGAUUGAAGCCAA | NM_032663 |
| 3250 | USP30 | GAAAUAACUCCCAAACAAA | NM_032663 |
| 3251 | USP30 | GGGAGUUAUAGGUGGAAUU | NM_032663 |
| 3252 | USP30 | CAUUGGAAGAUGAGCGAGA | NM_032663 |
| 3253 | USP30 | GGACAUAAACCUAGUCAAC | NM_032663 |
| 3254 | USP30 | ACAGAAAGAAAGAAGCGUA | NM_032663 |
| 3255 | USP30 | CAUCAGAAUCAGUGCGGGA | NM_032663 |
| 3256 | USP30 | GCGCCUACCUGCUGUUCUA | NM_032663 |
| 3257 | USP30 | GAACAAGAACCCAGGGCCU | NM_032663 |
| 3258 | USP30 | UGAUGGACAUUUACAAGUA | NM_032663 |
| 3259 | USP30 | UGUUGGAUGUCUUAAGAAU | NM_032663 |
| 3260 | USP30 | AAGAAAGAAGCGUAGAAAA | NM_032663 |
| 3261 | USP30 | AGAAAGAAGCGUAGAAAAG | NM_032663 |
| 3262 | USP30 | GCCAAGAAGUUACUGAUGA | NM_032663 |
| 3263 | USP31 | GGAUAAAGGAAAAGCAAAA | NM_032236 |
| 3264 | USP31 | GUGCAAGAUUUUAGAAAGA | NM_032236 |
| 3265 | USP31 | CAAAUUUGUUCCAGGAUAA | NM_032236 |
| 3266 | USP31 | GGACAAGGAAGAAGCUAAA | NM_032236 |
| 3267 | USP31 | GAAGAAGGGUUUAAAGGUA | NM_032236 |
| 3268 | USP31 | GAAAAGAAGAGGAGGAAUU | NM_032236 |
| 3269 | USP31 | CAGUAAAGGGCGAUGGAUU | NM_032236 |
| 3270 | USP31 | GCAGGAUGCUCAAGAAUUU | NM_032236 |
| 3271 | USP31 | CCAAAUUUGUUCCAGGAUA | NM_032236 |
| 3272 | USP31 | CCAUAAAGUUGUGGAUAAU | NM_032236 |
| 3273 | USP31 | GCAAACUGGACAUAAGAAA | NM_032236 |
| 3274 | USP31 | GUUUAAAGGUACUGGUCUU | NM_032236 |
| 3275 | USP31 | AAGAAGAGGAGGAAUUAAA | NM_032236 |
| 3276 | USP31 | CUGAAACAGAGGAGGACAA | NM_032236 |
| 3277 | USP31 | GGCGGAAAUUUGUUAGAAA | NM_032236 |
| 3278 | USP31 | AGUAGAACGUUGUCGCAUA | NM_032236 |
| 3279 | USP31 | ACAGCAAGUCUGAGGACAA | NM_020718 |
| 3280 | USP31 | AUGCAAAUACAACGGGAAA | NM_020718 |
| 3281 | USP31 | CUUCAAGACUAUUGUGUCA | NM_020718 |
| 3282 | USP31 | UGUCAGAAACAGAGCAACA | NM_020718 |
| 3283 | USP31 | UCGUAGAUACACAGAGCAA | NM_020718 |
| 3284 | USP31 | CAAAGAAACCAGAGAGCAC | NM_020718 |
| 3285 | USP31 | UUGUAAAUACUGAGGAUGA | NM_020718 |
| 3286 | USP31 | AUUUAGGCCUGAAGGAAUU | NM_020718 |
| 3287 | USP32 | AGGCAAAGAUGAAGAGAAA | NM_032582 |
| 3288 | USP32 | GGAGAUAUCCUGUGGGUUA | NM_032582 |
| 3289 | USP32 | GUAAAUGGUCGGUGGAUAA | NM_032582 |
| 3290 | USP32 | GAUCAAUUGUUGUGGAUUU | NM_032582 |
| 3291 | USP32 | GGACAAAUUAUUAGAGGAU | NM_032582 |
| 3292 | USP32 | GGAAGAAGAAGGACAAAUU | NM_032582 |
| 3293 | USP32 | GAAUACUACAGAAGAGAAA | NM_032582 |
| 3294 | USP32 | GCAUUAAAGAGGAAGAUAU | NM_032582 |
| 3295 | USP32 | CAGCUAAGAUCUCAAGUAA | NM_032582 |
| 3296 | USP32 | GCAUAUAAGUGUCCGAUUU | NM_032582 |
| 3297 | USP32 | GGACAAAUCCCAUUGGUAU | NM_032582 |
| 3298 | USP32 | GUACAUGGUUCCAACAUAA | NM_032582 |
| 3299 | USP32 | GAGAAACGCUAUUGGUUAU | NM_032582 |
| 3300 | USP32 | AGUAAAGGCUACAUCAUUA | NM_032582 |
| 3301 | USP32 | UGGCAAGGGAGGUGAAGAA | NM_032582 |
| 3302 | USP32 | UGGCAACAGUGGAAAGAAU | NM_032582 |
| 3303 | USP32 | ACUAGAAGGAGGACGAUUA | NM_032582 |
| 3304 | USP32 | GAACUAUGUUAUACGGGAA | NM_032582 |
| 3305 | USP32 | UCACAAAUGGAAUGGUUAA | NM_032582 |
| 3306 | USP32 | UAUCAAACAUCCCAGGAAA | NM_032582 |
| 3307 | USP32 | CAGUAUGGAUGAAGACUUU | NM_032582 |
| 3308 | USP32 | GGACAACCAUCUAAGAAGA | NM_032582 |
| 3309 | USP32 | GUGGAAAGAAUAUGUCAAA | NM_032582 |
| 3310 | USP32 | UGAUAUUGUAGAAGGCAUA | NM_032582 |
| 3311 | USP32 | AUGCAGACCAUCAAGGAAA | NM_032582 |
| 3312 | USP32 | ACGAUUUGAUUUAGAGACA | NM_032582 |
| 3313 | USP33 | CAGCAGAGCUUCAGAAUAU | NM_015017 |
| 3314 | USP33 | UUUUGAAAGUCUUGGGAAA | NM_015017 |
| 3315 | USP33 | CAACAGUGAUAGAGCAGAA | NM_015017 |
| 3316 | USP33 | AAAGAGAAGAUGUGCAAUA | NM_015017 |
| 3317 | USP33 | AGACAAUGGAAGAAGACAA | NM_015017 |
| 3318 | USP33 | AGACAUAUUUGAUGGAACA | NM_015017 |
| 3319 | USP33 | GGAAAUACUUGUUACAUGA | NM_015017 |
| 3320 | USP33 | CAGCUCAAAUUGUGACAUA | NM_015017 |
| 3321 | USP33 | UGGAAUAUGUGAAGAGGUU | NM_015017 |
| 3322 | USP33 | AGUCAUGGAAGUAGAAGAA | NM_015017 |
| 3323 | USP33 | AAAGAGAGGAGAAGGAUAU | NM_015017 |
| 3324 | USP33 | UCAGAAAUGUCAAAGGAUU | NM_015017 |
| 3325 | USP33 | AGUAAAUUCUGAAGGCGAA | NM_015017 |
| 3326 | USP33 | CGACAGUGGCUUAAUAAAU | NM_015017 |
| 3327 | USP33 | CUGAAACAGUCGACUUAAA | NM_015017 |
| 3328 | USP33 | GGACUAGCUCGAACAGAUA | NM_015017 |
| 3329 | USP33 | GGGCAUGUCUGGAGAAUAG | NM_015017 |
| 3330 | USP33 | UCAUGGAAGUAGAAGAAGA | NM_015017 |
| 3331 | USP33 | GGAGAAGGAUAUCAAAUUU | NM_015017 |
| 3332 | USP33 | UCAUGUUGAUCCAGAUAUA | NM_015017 |
| 3333 | USP33 | UGGAAGAAGACAAGAGCCA | NM_201624 |
| 3334 | USP33 | AUAUAGAAGCGGAUGAAGA | NM_015017 |
| 3335 | USP33 | GGAAACUGUCAAAGUGCAA | NM_201624 |
| 3336 | USP33 | GAUCAUGUGGCGAAGCAUA | NM_015017 |
| 3337 | USP33 | CAAUGUUAAUUCAGGAUGA | NM_015017 |
| 3338 | USP34 | GGAUAUAGUCCAAGAUGAA | NM_014709 |
| 3339 | USP34 | GCGGAAAGCCAUAGGAAAA | NM_014709 |
| 3340 | USP34 | CUACAAAGCUAGUGCCCUA | NM_014709 |
| 3341 | USP34 | CAGGUUAAGUUUAGAGCAA | NM_014709 |
| 3342 | USP34 | AUAGAAAGUUAGAGAGUCA | NM_014709 |
| 3343 | USP34 | GGGAAGAAGAAGAGGAGGA | NM_014709 |
| 3344 | USP34 | GGGCAUGUUUUAAGAAAUU | NM_014709 |
| 3345 | USP34 | CAAGCUAAUAGGAGGGAAA | NM_014709 |
| 3346 | USP34 | GCAUGGAACCAGAGGAAGA | NM_014709 |
| 3347 | USP34 | GGUUCAAAGUCAAGUGUUU | NM_014709 |
| 3348 | USP34 | GGGAAAGAGUGAGAGGAAA | NM_014709 |
| 3349 | USP34 | GAAGAAAGUACGAGCUGAA | NM_014709 |
| 3350 | USP34 | CGGAAUAGAAAGUUAGAGA | NM_014709 |
| 3351 | USP34 | GAGCAAGAAGCCAAAGAAA | NM_014709 |
| 3352 | USP34 | CCUAAUAUGUUGAUGGCAU | NM_014709 |
| 3353 | USP34 | GCAUAUAAUCCUAGACCUU | NM_014709 |
| 3354 | USP34 | GGAUAUGGGAGGUGAUUGA | NM_014709 |
| 3355 | USP34 | UGGGAAAGAGUGAGAGGAA | NM_014709 |
| 3356 | USP34 | GAGAAGAAGAAUUAGAAGA | NM_014709 |
| 3357 | USP34 | AUUAAAGCACUGUGGAAUA | NM_014709 |
| 3358 | USP34 | CAUAUUUAAUGGAGAGUGA | NM_014709 |
| 3359 | USP34 | GAACCAAACAUGUGCAACA | NM_014709 |
| 3360 | USP34 | AGAUAUGAGAGAAGAAGAA | NM_014709 |
| 3361 | USP34 | CAAAAGACUCAGAGAGCUA | NM_014709 |
| 3362 | USP34 | CAGAAAGGCAUUUGACAUU | NM_014709 |
| 3363 | USP34 | GAGCUUACGAUGUGAAGAA | NM_014709 |
| 3364 | USP34 | CAUCUGAGACAGUGGCAAA | NM_014709 |
| 3365 | USP34 | CCAAGUAUUCAGAGGAUAU | NM_014709 |
| 3366 | USP34 | GGAAAGAGUGAGAGGAAAG | NM_014709 |
| 3367 | USP34 | UCUCAUGGUUAUAGAAAGA | NM_014709 |
| 3368 | USP35 | GGAUAGAGAGGGAGGAAGA | XM_290527 |
| 3369 | USP35 | AAGAAGAGAAGGUGGAGAA | XM_290527 |
| 3370 | USP35 | AGGAAAGGAUAGAGAGGGA | XM_290527 |
| 3371 | USP35 | GUGGAGAAGGAGACAGAAA | XM_290527 |
| 3372 | USP35 | UGGAAGAGGAAGAAGAGAA | XM_290527 |
| 3373 | USP35 | AAGAGAAGGUGGAGAAGGA | XM_290527 |
| 3374 | USP35 | AAGACAAGGAUGAGGAUGA | XM_290527 |
| 3375 | USP35 | GGAAGGAGAGAGGGAGAAA | XM_290527 |
| 3376 | USP35 | AGAAAGAGGAGGAGGUGGA | XM_290527 |
| 3377 | USP35 | GGAAAGCACCAGAGGGGAA | XM_290527 |
| 3378 | USP35 | GUUAAGAAGUUCAGCAUCU | XM_290527 |
| 3379 | USP35 | GGGAGAAAGAGGAGGAGGU | XM_290527 |
| 3380 | USP35 | AAGGAGAGAGGGAGAAAGA | XM_290527 |
| 3381 | USP35 | CCGAGAAGGUGGUGGAGCU | XM_290527 |
| 3382 | USP35 | AAGAGGAGGAGGUGGAAGA | XM_290527 |
| 3383 | USP35 | GCUCGGAGUAUCUGAAGUA | XM_290527 |
| 3384 | USP35 | AGAGCGAGCUGGCGGGUUU | XM_290527 |
| 3385 | USP35 | AGGAAGAAGGGAAGGAGGA | XM_290527 |
| 3386 | USP35 | GGAGGAGGUGGAAGAGGAA | XM_290527 |
| 3387 | USP35 | AGGAGGAGGUGGAAGAGGA | XM_290527 |
| 3388 | USP35 | AGAGGGAGGAAGAAGGGAA | XM_290527 |
| 3389 | USP35 | AGGAAGAAGAGAAGGUGGA | XM_290527 |
| 3390 | USP35 | AGGAGGUGGAAGAGGAAGA | XM_290527 |
| 3391 | USP35 | AGACAAGGAUGAGGAUGAA | XM_290527 |
| 3392 | USP35 | GGAAGAGGAAGAAGAGAAG | XM_290527 |
| 3393 | USP35 | AGAGAACGGAGAAGGAAGA | XM_290527 |
| 3394 | USP35 | GAGAAGGUGGAGAAGGAGA | XM_290527 |
| 3395 | USP35 | AGACAGAAAAGGAGGCUGA | XM_290527 |
| 3396 | USP35 | AGGUGGAGAAGGAGACAGA | XM_290527 |
| 3397 | USP35 | AGGUGGAAGAGGAAGAAGA | XM_290527 |
| 3398 | USP36 | GGGAAGAGGAAGAGGAAGA | NM_025090 |
| 3399 | USP36 | GGAAGAGUCUCCAAGGAAA | NM_025090 |
| 3400 | USP36 | UGAUAAAGCUUACGGGAGA | NM_025090 |
| 3401 | USP36 | CGUAUAUGUCCCAGAAUAA | NM_025090 |
| 3402 | USP36 | GGAAGAGGAAGAAGAAGAA | NM_025090 |
| 3403 | USP36 | CUGGAAAGAAGGUGAAGAA | NM_025090 |
| 3404 | USP36 | AGGAAGAGGAAGAAGAAGA | NM_025090 |
| 3405 | USP36 | AAAGAAAGCAGGAGACACA | NM_025090 |
| 3406 | USP36 | GGACUGAGACCGUGGUUGA | NM_025090 |
| 3407 | USP36 | GCACACCACUGAAGAGAUU | NM_025090 |
| 3408 | USP36 | UGUCCUGAGUGGAGAGAAU | NM_025090 |
| 3409 | USP36 | GUGCUAAAUGCAAGAAGAA | NM_025090 |
| 3410 | USP36 | AAGAGAGAGAAGAGGAGAA | NM_025090 |
| 3411 | USP36 | GGGAAGGAAAAGAAAAUUA | NM_025090 |
| 3412 | USP36 | AGAGAGAAGAGGAGAAACU | NM_025090 |
| 3413 | USP36 | CCAAGAAGAACAUCGGCAA | NM_025090 |
| 3414 | USP36 | GGAAAGGAGCAGAAGGUCU | NM_025090 |
| 3415 | USP36 | GGACAGUGGUACCAGAUGA | NM_025090 |
| 3416 | USP36 | CACCAAGGAUGUAGGCUAU | NM_025090 |
| 3417 | USP36 | GAAAGGAGCAGAAGGUCUU | NM_025090 |
| 3418 | USP36 | AGCAGAAGGUCUUGGUGAA | NM_025090 |
| 3419 | USP36 | UCACCAAGGAUGUAGGCUA | NM_025090 |
| 3420 | USP36 | AGAGAGAGAAGAGGAGAAA | NM_025090 |
| 3421 | USP36 | AGAGGAAGAGGAAGAAGAA | NM_025090 |
| 3422 | USP36 | GAGGAGGAAAGGAGCAGAA | NM_025090 |
| 3423 | USP36 | CGACAAGACUCUGGGACGA | NM_025090 |
| 3424 | USP36 | CUCAAAUACUCAUCUGAUA | NM_025090 |
| 3425 | USP37 | CUACAAUACUGGAGGAAUU | NM_020935 |
| 3426 | USP37 | GAAGAUUACCCUAAGGAAA | NM_020935 |
| 3427 | USP37 | CAAAAGAGCUACCGAGUUA | NM_020935 |
| 3428 | USP37 | GAAAAGAAAUGCUGAGACA | NM_020935 |
| 3429 | USP37 | GCUCAGAAUUGAAUGAAGA | NM_020935 |
| 3430 | USP37 | AAGUAAGGAUGCAGAGGAA | NM_020935 |
| 3431 | USP37 | GCGUGAAAGGGAAGAGCAA | NM_020935 |
| 3432 | USP37 | GUGAAAGGGAAGAGCAAGA | NM_020935 |
| 3433 | USP37 | GUAAGGAUGCAGAGGAAAU | NM_020935 |
| 3434 | USP37 | GGAAAUACCUGCUAUAUGA | NM_020935 |
| 3435 | USP37 | CCGAAGAACUGGAGUAUUC | NM_020935 |
| 3436 | USP37 | GAAAAGAGGAAAAGAAUGA | NM_020935 |
| 3437 | USP37 | GAGAAAAGCAGCUGAGUUU | NM_020935 |
| 3438 | USP37 | CUGAAAGAAGAUAUGGAAA | NM_020935 |
| 3439 | USP37 | GAUUAAGACUGUAGCAGGA | NM_020935 |
| 3440 | USP37 | UCGAAAAGUUCUUGGUAAU | NM_020935 |
| 3441 | USP37 | CAGCUAAGUCAUAACAUUA | NM_020935 |
| 3442 | USP37 | GAAGAAAAUUCACCAGAUA | NM_020935 |
| 3443 | USP37 | ACUCAGGAUUUGACAGAAU | NM_020935 |
| 3444 | USP37 | AGAUCAGGGUUGCUAGAAA | NM_020935 |
| 3445 | USP37 | GAAACAGUCAGAAGAGAAU | NM_020935 |
| 3446 | USP37 | GGGCCGAAGAACUGGAGUA | NM_020935 |
| 3447 | USP37 | UGACAGAAUGAGCGAAGAA | NM_020935 |
| 3448 | USP37 | AGCCAGAGACUUUGUGAAA | NM_020935 |
| 3449 | USP37 | GAGAUAAGUAAGAGAGAUG | NM_020935 |
| 3450 | USP37 | GGGAACAGAAAGAAGAUGA | NM_020935 |
| 3451 | USP37 | CUGAGGAACUGAAAAGAAA | NM_020935 |
| 3452 | USP37 | GGAGGAAUUCCAAGGAUAU | NM_020935 |
| 3453 | USP37 | UGUAGCAGGAAGUGGAAUA | NM_020935 |
| 3454 | USP37 | GAAUAGGACAUCAGGGCUU | NM_020935 |
| 3455 | USP38 | GCAUAGUACUAAUGGUUUA | NM_032557 |
| 3456 | USP38 | CAGAAGAACCAGUAGUUUA | NM_032557 |
| 3457 | USP38 | ACACAAGCCUUCUGAAAUU | NM_032557 |
| 3458 | USP38 | GGAAGUAGCUAGUAAAGCA | NM_032557 |
| 3459 | USP38 | GAAAGAGAGCUGCGGGAAU | NM_032557 |
| 3460 | USP38 | CAGCAAGACUGUUCUGAAU | NM_032557 |
| 3461 | USP38 | ACUAAUGGUUUAAGUGGUA | NM_032557 |
| 3462 | USP38 | UCAGAAACCAGGAGGUGAA | NM_032557 |
| 3463 | USP38 | GGUAAUUGCACUCCUGAAA | NM_032557 |
| 3464 | USP38 | GUAACUUGCUGCAGAACAU | NM_032557 |
| 3465 | USP38 | GAGUUUUACUGUUCUGAAA | NM_032557 |
| 3466 | USP38 | CUGGAUAAAUGGAGACCCA | NM_032557 |
| 3467 | USP38 | GUAUCAUGUGAGAAGGAAA | NM_032557 |
| 3468 | USP38 | UUUAAUGACAGUAGAGUGA | NM_032557 |
| 3469 | USP38 | AGGUAGAGGUGUUACGGAU | NM_032557 |
| 3470 | USP39 | UGAAUAACAUAAAGGCCAA | NM_006590 |
| 3471 | USP39 | GAGAAUACUUGUCUGAAGA | NM_006590 |
| 3472 | USP39 | CCAUGAGGAUCUUCACUAA | NM_006590 |
| 3473 | USP39 | GCAUCACUGAGAAGGAAUA | NM_006590 |
| 3474 | USP39 | ACGAGUACCAGGAGACAAU | NM_006590 |
| 3475 | USP39 | CAAAUGUGGAUCUGAGAGA | NM_006590 |
| 3476 | USP39 | UCACUGAGAAGGAAUAUAA | NM_006590 |
| 3477 | USP39 | AGACUUACAAGGAGAACUU | NM_006590 |
| 3478 | USP39 | CUGAAUAACAUAAAGGCCA | NM_006590 |
| 3479 | USP39 | GGGUAUUGUGGGACUGAAU | NM_006590 |
| 3480 | USP39 | UGGCUAAGUUCAAUGGCAU | NM_006590 |
| 3481 | USP39 | UCUUCAACAUCCUGGCUAA | NM_006590 |
| 3482 | USP4 | CCAAAUGGAUGAAGGUUUA | NM_003363 |
| 3483 | USP4 | AGAACAAACUGAAUGGUAA | NM_003363 |
| 3484 | USP4 | GAACAAACUGAAUGGUAAA | NM_003363 |
| 3485 | USP4 | GGAACAAAUACAUGAGCAA | NM_199443 |
| 3486 | USP4 | AGGAAGAAAUGGAGCAUCA | NM_003363 |
| 3487 | USP4 | GGAAGAAGUAUGUGGGCUU | NM_003363 |
| 3488 | USP4 | GAGAAGAUGAGGAAGAAAU | NM_003363 |
| 3489 | USP4 | CUGCAUAUGCGAAGAACAA | NM_003363 |
| 3490 | USP4 | CCUCAGAAGAAGAAGAAGA | NM_003363 |
| 3491 | USP4 | AACAGAUACUGGAGGGAUA | NM_003363 |
| 3492 | USP4 | GCAAAUGGUGAUAGCACUA | NM_003363 |
| 3493 | USP4 | GGGAAGAUGAGCCAGGAAA | NM_003363 |
| 3494 | USP4 | CCUACGAGCAGUUGAGCAA | NM_003363 |
| 3495 | USP4 | GAACAGCUGUGAAGGAGAA | NM_003363 |
| 3496 | USP4 | GGAAAUUGCAGAAGCCUAU | NM_003363 |
| 3497 | USP4 | GGAAGAUGAGCCAGGAAAU | NM_003363 |
| 3498 | USP4 | AAGGAGAAGAUGAGGAAGA | NM_199443 |
| 3499 | USP4 | GGGAUAAGCUCGACACAGU | NM_003363 |
| 3500 | USP4 | GCAUCAGGAAGAAGGCAAA | NM_003363 |
| 3501 | USP4 | GGGAAAUUGCAGAAGCCUA | NM_199443 |
| 3502 | USP4 | ACGAGAAGCAUGUGAGCAU | NM_003363 |
| 3503 | USP4 | CAGAUGCGGUGGUGGCAAA | NM_003363 |
| 3504 | USP4 | GAGAGGAAGUCCAGGCCAU | NM_003363 |
| 3505 | USP4 | GCAAAGUCGAGGUGUAUUU | NM_003363 |
| 3506 | USP4 | GAAGAAAGAUCGAGUUAUG | NM_003363 |
| 3507 | USP4 | ACUGCAAAGUCGAGGUGUA | NM_003363 |
| 3508 | USP4 | GCAAAGGAAGCCUGGGAGA | NM_003363 |
| 3509 | USP4 | GAACUGAAGCUCUGUGAGA | NM_003363 |
| 3510 | USP4 | UGAAGGAGAAGAUGAGGAA | NM_003363 |
| 3511 | USP4 | CAGAAGAAGAAGAAGACCA | NM_199443 |
| 3512 | USP40 | GGGAAGAAAUUAAAGACUA | NM_018218 |
| 3513 | USP40 | GCUUUUAAUUGAAGGACAA | NM_018218 |
| 3514 | USP40 | CAAAUAACCAAGAGGAAAA | NM_018218 |
| 3515 | USP40 | GGAAAAGGGAAGAAAUUAA | NM_018218 |
| 3516 | USP40 | AAACAAUAUCUGUGAGAGA | NM_018218 |
| 3517 | USP40 | AGGAUAAACCCGAUGCAAA | NM_018218 |
| 3518 | USP40 | CCAAGGAAGACAUGAGGAA | NM_018218 |
| 3519 | USP40 | CAAUCUUAUUAGAGGAGAA | NM_018218 |
| 3520 | USP40 | GCUCAGAAAUGGAAGCUCA | NM_018218 |
| 3521 | USP40 | AGUUAGAAUCUGAAGAGAA | NM_018218 |
| 3522 | USP40 | ACAAAUAACCAAGAGGAAA | NM_018218 |
| 3523 | USP40 | GGACCAGUAAUGAGGAAAU | NM_018218 |
| 3524 | USP40 | CUGAAGAGAAGCAAGUUAA | NM_018218 |
| 3525 | USP40 | CCAGAGUGAAGAAGAGAUU | NM_018218 |
| 3526 | USP40 | AAGGAAGACAUGAGGAAGA | NM_018218 |
| 3527 | USP40 | UGAAAUUGCUGAUGGGGAA | NM_018218 |
| 3528 | USP40 | UGUAAGAACGUUAGCGAGA | NM_018218 |
| 3529 | USP40 | UGGAAAUCGUAGUAGAAGA | NM_018218 |
| 3530 | USP40 | CUAUGAAGCUGGAGAGCCU | NM_018218 |
| 3531 | USP40 | GGGACUGUGUCUUGGAAAA | NM_018218 |
| 3532 | USP40 | AAGUAAACCAGAUGUGAAU | NM_018218 |
| 3533 | USP40 | CCUGGACGGUGGAGAGGAA | NM_018218 |
| 3534 | USP40 | GGAUUAAUCUCAAGCCCUU | NM_018218 |
| 3535 | USP40 | CUGAUAUGUUCUGGAGAUA | NM_018218 |
| 3536 | USP40 | GCAGAAUUGAAGAUGGGAA | NM_018218 |
| 3537 | USP40 | AGUUAAUGCUGAAGAAAUC | NM_018218 |
| 3538 | USP40 | AAUCAUCCCUUUACAGUUA | NM_018218 |
| 3539 | USP40 | GGGAAAAGGAUAUUGAACA | NM_018218 |
| 3540 | USP40 | AUGUUGAUCAUUUGGGAAA | NM_018218 |
| 3541 | USP40 | CGGAGAUACUAUUGGUGUU | NM_018218 |
| 3542 | USP42 | CGGAACAGCUUGAUGGAGA | XM_374396 |
| 3543 | USP42 | GGGCAAGGAGAAUGGGAUU | XM_374396 |
| 3544 | USP42 | CUAGAAGAGCCUAAAGCAA | XM_374396 |
| 3545 | USP42 | UCUGAAACGUUUUGCAAAU | XM_376571 |
| 3546 | USP42 | GGAGCAAGACUGAGGGCCA | XM_374396 |
| 3547 | USP42 | CAGCAAUAAAUUAGACAGA | XM_376571 |
| 3548 | USP42 | CAUAGUAAUUCUUUGGAGA | XM_376571 |
| 3549 | USP42 | CAAGAAAAUCAGAGGACUU | XM_376571 |
| 3550 | USP42 | AGUCAAAGGGGCUGGGCAA | XM_374396 |
| 3551 | USP42 | CUGAAAGGCUCGACGGAUG | XM_374396 |
| 3552 | USP42 | GCUUCAAAGAGGUUCACUA | XM_374396 |
| 3553 | USP42 | CAGUCAUGUUGAAAAGAAA | XM_374396 |
| 3554 | USP42 | CUUGAAUGGCAGCAAUAAA | XM_374396 |
| 3555 | USP42 | GCUCCCAGCCCGUGAUGAA | XM_374396 |
| 3556 | USP42 | CAGUGAUAUUAGAUCGGUA | XM_374396 |
| 3557 | USP42 | CCAAAGACAAACACCGAGA | XM_374396 |
| 3558 | USP42 | GUGCAGACAGCGACAGUGA | XM_374396 |
| 3559 | USP42 | ACAAAAGGAUCAAGCCCUA | XM_374396 |
| 3560 | USP42 | CUCCAGAAUUUGGGCAAUA | XM_376571 |
| 3561 | USP42 | GCAACAAACUGAAAGGCUC | XM_376571 |
| 3562 | USP42 | CCUGGAACGUACAGCUCUA | XM_376571 |
| 3563 | USP42 | GCUUAGCAACAAACUGAAA | XM_374396 |
| 3564 | USP42 | UCAACAAGGCAUUGGAGCA | XM_374396 |
| 3565 | USP42 | CUUCAGGCUUAGCAACAAA | XM_374396 |
| 3566 | USP42 | GGCCAUUACUUCUGCUACA | XM_374396 |
| 3567 | USP42 | AAACACUUACGGAUGGAAA | XM_376571 |
| 3568 | USP42 | CUAAAGCAAAGAAGCACAA | XM_376571 |
| 3569 | USP42 | GGAAAGUCCCGGAAACGGA | XM_374396 |
| 3570 | USP42 | CACUCUUGUUUGUCAGAUA | XM_374396 |
| 3571 | USP42 | CAGUCUACCUCGAACGCAU | XM_374396 |
| 3572 | USP43 | GCCAUGAACUGGAAGGAGA | XM_371015 |
| 3573 | USP43 | GCUUGAAGAACCACGGCAA | XM_371015 |
| 3574 | USP43 | GCUCUCAGUUCCAAGGCAA | XM_371015 |
| 3575 | USP43 | AGACGAGGUUCUUGAGUGU | XM_371015 |
| 3576 | USP43 | GCGCUCAGGGCUUGAAGAA | XM_371015 |
| 3577 | USP43 | GGAAGAUGGUUGCAGAGGA | XM_371015 |
| 3578 | USP43 | CGGAAGAAGGAGAACAGGA | XM_371015 |
| 3579 | USP43 | GAGAUAAUGUGUAUGCCUU | XM_371015 |
| 3580 | USP43 | GUGCAGUGUCUCAGCAACA | XM_371015 |
| 3581 | USP43 | CAGCAAAGACAGUCGCCGA | XM_371015 |
| 3582 | USP43 | AUACCAUCGCAGAGGGAGA | XM_371015 |
| 3583 | USP43 | UGAACUGGAAGGAGAGCUU | XM_371015 |
| 3584 | USP43 | GAGGAUGAGAAGUCAGCAU | XM_371015 |
| 3585 | USP43 | CAGGUGGGCGAGAGAAGAA | XM_371015 |
| 3586 | USP44 | GUAACAGGAUUGAGAAAUU | NM_032147 |
| 3587 | USP44 | AAGCAGAAUUGGAAAGUAU | NM_032147 |
| 3588 | USP44 | GAUUGAGAAAUUUGGGAAA | NM_032147 |
| 3589 | USP44 | GUAUCAAGUUAAAGCAGAA | NM_032147 |
| 3590 | USP44 | GUGUAACAGGAUUGAGAAA | NM_032147 |
| 3591 | USP44 | GGAAAUACUUGCUAUAUGA | NM_032147 |
| 3592 | USP44 | AAACUAAGCAUGUGCACUA | NM_032147 |
| 3593 | USP44 | ACUAAGUGGUGGAGCAUCA | NM_032147 |
| 3594 | USP44 | UCUUAAACAUGGAGCCCUA | NM_032147 |
| 3595 | USP44 | AUGAAUGAAUGUCAGGAAA | NM_032147 |
| 3596 | USP44 | CUGAAGCUUUAGAAGGAAA | NM_032147 |
| 3597 | USP44 | GGUAAAAUCUUUCGAACAU | NM_032147 |
| 3598 | USP44 | GAAUUGGAGUAUCAAGUUA | NM_032147 |
| 3599 | USP44 | CUGAAAUGUUGGCCAAAUU | NM_032147 |
| 3600 | USP44 | GCUCUUUGGCACAGGAGAA | NM_032147 |
| 3601 | USP44 | CCAUGUUGCCUGUGGAAGA | NM_032147 |
| 3602 | USP44 | GGACGUAAUAACCGAGAGA | NM_032147 |
| 3603 | USP46 | CAGAAAAGGAUGAGGGUAA | NM_022832 |
| 3604 | USP46 | CAGCAAAAGAAGAAGGAAA | NM_022832 |
| 3605 | USP46 | UGAUGACAUUGUAGAGAAA | NM_022832 |
| 3606 | USP46 | CCAAAGAAGUUCAUUUCAA | NM_022832 |
| 3607 | USP46 | CUAUCAGUCAAGAGAGUAA | NM_022832 |
| 3608 | USP46 | GAGGAGAAGAAACAGGAAA | NM_022832 |
| 3609 | USP46 | AGCAAAAGAAGAAGGAAAA | NM_022832 |
| 3610 | USP46 | GGUCAAUUUUGGAAACACA | NM_022832 |
| 3611 | USP46 | AGGAGAAGAAACAGGAAAA | NM_022832 |
| 3612 | USP46 | CUAAGAGACUUCAGCAACA | NM_022832 |
| 3613 | USP46 | CAUACAAGGCCCAGCAAAA | NM_022832 |
| 3614 | USP47 | GAACAGAAAUGGAAGCAAA | NM_017944 |
| 3615 | USP47 | GAAAGCAAAUGAAGGGAAA | NM_017944 |
| 3616 | USP47 | CCUGAAAGCUGAAGGAUUU | NM_017944 |
| 3617 | USP47 | GCGCAAUACAUGCAAGAUA | NM_017944 |
| 3618 | USP47 | GCUUAUAAGAUGAUGGAUU | NM_017944 |
| 3619 | USP47 | AGGAAUGACUGUACGGCAA | NM_017944 |
| 3620 | USP47 | CAGCAAAAGUACUGAGACA | NM_017944 |
| 3621 | USP47 | GAAAAGAGACAACGAGAAA | NM_017944 |
| 3622 | USP47 | GGAUAUUAUUCUAGUGCUU | NM_017944 |
| 3623 | USP47 | GCUCCGAGACUUUGGAUUA | NM_017944 |
| 3624 | USP47 | CGCAAUACAUGCAAGAUAA | NM_017944 |
| 3625 | USP47 | UGACAGAUGAGCAAAGAAA | NM_017944 |
| 3626 | USP47 | GUGAAUAAUGACAGGAGUA | NM_017944 |
| 3627 | USP47 | GGAUAACACAAGAGGACAU | NM_017944 |
| 3628 | USP47 | AGAGAGAGUUGGAAGAACA | NM_017944 |
| 3629 | USP47 | GCAUUAUAUAAGUGGGAAU | NM_017944 |
| 3630 | USP47 | GGAUGAUGACUGUGAAAGA | NM_017944 |
| 3631 | USP47 | AAGGCAAGCUGAAGGACUA | NM_017944 |
| 3632 | USP47 | AAAGGAGAAUACAGAGUUA | NM_017944 |
| 3633 | USP47 | AGUAGAAGAACGAAAGCAA | NM_017944 |
| 3634 | USP47 | GUAUAAAGUCAUUCAGUGA | NM_017944 |
| 3635 | USP49 | GGGCAAGAGUGUUCAGCAA | NM_004275 |
| 3636 | USP49 | GAGAAUGGCCCUUGCCUUA | NM_004275 |
| 3637 | USP49 | GGGCAGAGAAGCAAGGAAC | NM_004275 |
| 3638 | USP49 | GUGUGGACUGUGAGACUUA | NM_004275 |
| 3639 | USP49 | UCGAGUUCCUACAGAGUUU | NM_004275 |
| 3640 | USP49 | GGCAAGAGUGUUCAGCAAA | NM_004275 |
| 3641 | USP5 | CCACAGAGAAGGUGAAGUA | NM_003481 |
| 3642 | USP5 | UGGAUAAGCUGGAGAAGAU | NM_003481 |
| 3643 | USP5 | UCAACAUGGUGGAGAGGAA | NM_003481 |
| 3644 | USP5 | AGAGGAAGUAUGUGGAUAA | NM_003481 |
| 3645 | USP5 | UGACUGAGUUGGAGAUAGA | NM_003481 |
| 3646 | USP5 | AAGAGGAGCUUCUGGAGUA | NM_003481 |
| 3647 | USP5 | GAGCAGAGGGGCAGCGAUA | NM_003481 |
| 3648 | USP5 | GGAUGGUCCUGGAAAGUAU | NM_003481 |
| 3649 | USP5 | UGGAGUACGAGGAGAAGAA | NM_003481 |
| 3650 | USP5 | CGAGGAGAAGUUUGAAUUA | NM_003481 |
| 3651 | USP5 | GGAUGCAGCCCUUAACAAA | NM_003481 |
| 3652 | USP5 | AGAGAGAACCUGUGGCUCA | NM_003481 |
| 3653 | USP5 | AGGAGAAGUUUGAAUUAGA | NM_003481 |
| 3654 | USP5 | GAGCUGACGUGUACUCAUA | NM_003481 |
| 3655 | USP5 | CAGAGGAAGUAUGUGGAUA | NM_003481 |
| 3656 | USP5 | GCCUCAAGCAGUUGGACAA | NM_003481 |
| 3657 | USP5 | GUGGAGAGACAUUUCAAUA | NM_003481 |
| 3658 | USP5 | CAUCAAGAAAGAAGGCAGA | NM_003481 |
| 3659 | USP5 | AAAGAAGGCAGAUGGGUGA | NM_003481 |
| 3660 | USP5 | GCGAGGAGAAGUUUGAAUU | NM_003481 |
| 3661 | USP5 | UGGAGAGACAUUUCAAUAA | NM_003481 |
| 3662 | USP5 | AACAGUAUGUGGAGAGACA | NM_003481 |
| 3663 | USP5 | CAAAAUACACGAUGUGAAU | NM_003481 |
| 3664 | USP5 | CAGACAAGACGAUGACUGA | NM_003481 |
| 3665 | USP5 | AAGUGUGACAUGAGAGAGA | NM_003481 |
| 3666 | USP5 | AGUUGGAGAUAGACAUGAA | NM_003481 |
| 3667 | USP5 | AAGCCGAAGAGGAGAAGAU | NM_003481 |
| 3668 | USP5 | GAUCUACAAUGACCAGAAA | NM_003481 |
| 3669 | USP5 | CCAAGUGUGACAUGAGAGA | NM_003481 |
| 3670 | USP5 | GCUUCUUGGUGGAGGAAAG | NM_003481 |
| 3671 | USP52 | GCAGAAAGAUGGACUGGAA | NM_014871 |
| 3672 | USP52 | GGGAAAUCUCCAAGAACAA | NM_014871 |
| 3673 | USP52 | GAGUCAAGUUUGUGGGUCA | NM_014871 |
| 3674 | USP52 | UGGAAAUACCACAGGCUUA | NM_014871 |
| 3675 | USP52 | CCAUUGAGGAGUUGAAGAA | NM_014871 |
| 3676 | USP52 | AGAACAACCUCAAGUAUAU | NM_014871 |
| 3677 | USP52 | UGGAUGAGAAUGAGGAUAU | NM_014871 |
| 3678 | USP52 | GCACGGAAGCAGCGGAAAA | NM_014871 |
| 3679 | USP52 | CCAUGAAGAAGGUGGGCUU | NM_014871 |
| 3680 | USP52 | CCUUCAAGAUGGCAGUAAA | NM_014871 |
| 3681 | USP52 | GCACUGAGCCUGAGUCUUU | NM_014871 |
| 3682 | USP52 | CAUCAAAGUUGGAGAGACC | NM_014871 |
| 3683 | USP52 | GUGUAUGACCUGAUGGCUA | NM_014871 |
| 3684 | USP52 | GGGUCUGGAUGCUGAGUUU | NM_014871 |
| 3685 | USP52 | GGGAAACCCAUGACAGUAU | NM_014871 |
| 3686 | USP53 | CCUAAGAACUGUUGGGUUA | XM_052597 |
| 3687 | USP53 | GCAAUGAGGUUGAAAGAAU | XM_052597 |
| 3688 | USP53 | GGAAGAGAGUGAACAGUAA | XM_052597 |
| 3689 | USP53 | CAGCAUAGUCCAAGACAUA | XM_052597 |
| 3690 | USP53 | CAGGCAAAGCAGAGAGAAA | XM_052597 |
| 3691 | USP53 | GAUUGGAACUAGAUGGAAA | XM_052597 |
| 3692 | USP53 | CGACGAAGCUUGCGGGUUU | XM_052597 |
| 3693 | USP53 | GGAUAUCAGUGGUGUUAAA | XM_052597 |
| 3694 | USP53 | UGGAAAAGGAGCAGAGAAA | XM_052597 |
| 3695 | USP53 | AGCCAAGAUUCUAGGGAUA | XM_052597 |
| 3696 | USP53 | GAUAAUUGGCAGAUGCAAA | XM_052597 |
| 3697 | USP53 | ACAGAUGACUAUAGGAAAU | XM_052597 |
| 3698 | USP53 | CCAUAAUGCAAGAGAACAU | XM_052597 |
| 3699 | USP53 | GUUGAAAGAAUGUUGGAAA | XM_052597 |
| 3700 | USP53 | GUUAAAUGAACCAGGACAA | XM_052597 |
| 3701 | USP53 | UGGAAACCUAUGAGAGAAA | XM_052597 |
| 3702 | USP53 | UUACAGAAUUUGUGCGGUA | XM_052597 |
| 3703 | USP53 | GGAAAGAUGUUGUCUCCAA | XM_052597 |
| 3704 | USP53 | GGGAAGAGAGUGAACAGUA | XM_052597 |
| 3705 | USP53 | ACGGAAACCUGGUGGCAAU | XM_052597 |
| 3706 | USP53 | GAUGAAAUGAAGCAGGAAA | XM_052597 |
| 3707 | USP53 | CGACAAGCAACCUAAAUAA | XM_052597 |
| 3708 | USP53 | GGGACAAAGAAAAGAUUUA | XM_052597 |
| 3709 | USP53 | UGAAGACAAUGGAAAGUUA | XM_052597 |
| 3710 | USP53 | GAUCAAAGGGAAAAGAUAA | XM_052597 |
| 3711 | USP53 | GCAUAGUCCAAGACAUAAA | XM_052597 |
| 3712 | USP53 | UGACAAUGGCACUGGAUAU | XM_052597 |
| 3713 | USP53 | CAACAGAUGACUAUAGGAA | XM_052597 |
| 3714 | USP53 | GGGAAAAGAUAAAAGACAU | XM_052597 |
| 3715 | USP53 | UCACAUUGAUCAAAGGGAA | XM_052597 |
| 3716 | USP54 | ACAAGAAGGAAGAGGCAUU | NM_152586 |
| 3717 | USP54 | AGGAAGAGGCAUUGCUCAA | NM_152586 |
| 3718 | USP54 | CUCACAGGGUCAAGAGAAA | NM_152586 |
| 3719 | USP54 | GGACAGAGGCAGUGAGGAG | NM_152586 |
| 3720 | USP54 | CCACAAGAAGGAAGAGGCA | NM_152586 |
| 3721 | USP54 | AGUACAGUGCAGAGAAUUU | NM_152586 |
| 3722 | USP54 | CAAUAGACUCCCAGGAACU | NM_152586 |
| 3723 | USP54 | GGCCAUGGGCAAAGCAACA | NM_152586 |
| 3724 | USP54 | GGUGUCUCCAUGAGGGAUA | NM_152586 |
| 3725 | USP54 | GUGAGAGAUGUUAGGUCUA | NM_152586 |
| 3726 | USP54 | AUUCAUCAAACGUGAGGAA | NM_152586 |
| 3727 | USP54 | AGAGAGCAGAUCAGGGCUA | NM_152586 |
| 3728 | USP6 | AGGAAAGGGUUGUAGAUAA | NM_004505 |
| 3729 | USP6 | GUAAAUGAUCAGUGGAUAA | NM_004505 |
| 3730 | USP6 | GCUAAGAUCUCAAGUCAAA | NM_004505 |
| 3731 | USP6 | GCGGAGAGGUUCACAACAA | NM_004505 |
| 3732 | USP6 | GGAUGGAAAUGCUGGGAGA | NM_004505 |
| 3733 | USP6 | CGAAGAAACUAACAAGGAA | NM_004505 |
| 3734 | USP6 | GAACAAAUAUGUAGUGAGU | NM_004505 |
| 3735 | USP6 | GUACAUGAUUCCAACAUAA | NM_004505 |
| 3736 | USP6 | CAAGAGAGGUGAAGAAAGU | NM_004505 |
| 3737 | USP6 | GGAGAAUGGGAGACAUAUA | NM_004505 |
| 3738 | USP6 | GCACAGGAGCGGAAGGACA | NM_004505 |
| 3739 | USP6 | GGAGAAAGCAAGAUCAUGA | NM_004505 |
| 3740 | USP6 | GGGCAGUUGUGGAAAGUGA | NM_004505 |
| 3741 | USP6 | GGAUGGACAUGGUAGAGAA | NM_004505 |
| 3742 | USP6 | ACGAGCAAGUGGAUGGAAA | NM_004505 |
| 3743 | USP6 | UGGGAGAAUGGGAGACAUA | NM_004505 |
| 3744 | USP6 | CCAUUAGCCUGUAAACAAA | NM_004505 |
| 3745 | USP6 | GGAAAGGGUUGUAGAUAAG | NM_004505 |
| 3746 | USP6 | GCUAAAUGCUAUGGUGAUU | NM_004505 |
| 3747 | USP6 | GGACCUACCCAAACCAAUA | NM_004505 |
| 3748 | USP6 | GCUCUAAGGGCUAUAAAUU | NM_004505 |
| 3749 | USP6 | CAACAAAGAAGCUGGAUCU | NM_004505 |
| 3750 | USP6 | GUCCAGAUAUGAACAAAUA | NM_004505 |
| 3751 | USP6 | GCACAGUAGCAAACUCAUA | NM_004505 |
| 3752 | USP6 | AGACAGCACUGAUGACCAA | NM_004505 |
| 3753 | USP6 | CCAUGUGGCAUCAGGACAA | NM_004505 |
| 3754 | USP7 | GGAGAAAGCAUCAGGGAAA | NM_003470 |
| 3755 | USP7 | GGACAUAGACAAAGAGAAU | NM_003470 |
| 3756 | USP7 | UGAUAAACCUGUAGGAACA | NM_003470 |
| 3757 | USP7 | GCGAUUACAAGAAGAGAAA | NM_003470 |
| 3758 | USP7 | GAGAAGUGAUGAAGCGAAU | NM_003470 |
| 3759 | USP7 | UGAUAAAGCCCUUGAUGAA | NM_003470 |
| 3760 | USP7 | CGAAUUUAACAGAGAGAAU | NM_003470 |
| 3761 | USP7 | GGUUCAUAGUGGAGAUAAU | NM_003470 |
| 3762 | USP7 | CAGAGAAAGGUGUGAAAUU | NM_003470 |
| 3763 | USP7 | GUGUAAAGAAGUAGACUAU | NM_003470 |
| 3764 | USP7 | CAGAGAGAAUUCAGGACUA | NM_003470 |
| 3765 | USP7 | GGGCAUAUCUACACACCAA | NM_003470 |
| 3766 | USP7 | AGAAGGAGUUUGAGAAGUU | NM_003470 |
| 3767 | USP7 | GAGAACAGGCGAAGUUUUA | NM_003470 |
| 3768 | USP7 | CAGCAAUGUUAGAUAAUGA | NM_003470 |
| 3769 | USP7 | GAAUUACAGCAUAGUGAUA | NM_003470 |
| 3770 | USP7 | GGUAAUCCUCUUAGACAUA | NM_003470 |
| 3771 | USP7 | AAACUUAGGCUGCUAGAAA | NM_003470 |
| 3772 | USP7 | ACAUAAAUGAAGACGAGUA | NM_003470 |
| 3773 | USP7 | ACAUAGACAAAGAGAAUGA | NM_003470 |
| 3774 | USP7 | AGAUAAUCAUGGUGGACAU | NM_003470 |
| 3775 | USP7 | CUACAACUGAUGAGAUUUA | NM_003470 |
| 3776 | USP7 | CUUACAGGAAGCAGAGAAA | NM_003470 |
| 3777 | USP7 | GGAAAUAACACUAUAUCCA | NM_003470 |
| 3778 | USP7 | AGGAGGACAUGGAGGAUGA | NM_003470 |
| 3779 | USP7 | GGGAGAAAGCAUCAGGGAA | NM_003470 |
| 3780 | USP7 | GGAACAUGGCUUACAGGAA | NM_003470 |
| 3781 | USP7 | GUGCAUCUGUUAAGGCAAA | NM_003470 |
| 3782 | USP7 | CCAAUUUAGGGAAGAGGAA | NM_003470 |
| 3783 | USP7 | UGACGUGUCUCUUGAUAAA | NM_003470 |
| 3784 | USP8 | AAGAAGAAAUGGAGAAGAA | NM_005154 |
| 3785 | USP8 | CGAAAGAAAUAAAGCUCAA | NM_005154 |
| 3786 | USP8 | GGACAGGACAGUAUAGAUA | NM_005154 |
| 3787 | USP8 | CCUGAAGAGCAUAGAAUAA | NM_005154 |
| 3788 | USP8 | CUUUAAAGCUGCAGAACAU | NM_005154 |
| 3789 | USP8 | AAAUAAAGCUCAACGAGAA | NM_005154 |
| 3790 | USP8 | ACACAAUGAUGACGGAUAA | NM_005154 |
| 3791 | USP8 | GAAAUGGAGAAGAAAGAAA | NM_005154 |
| 3792 | USP8 | GAUAAUCGGAAGAGAUAUA | NM_005154 |
| 3793 | USP8 | GUACAAACCAUGAGCAACA | NM_005154 |
| 3794 | USP8 | GGAAACAGGAAGAGAGGAU | NM_005154 |
| 3795 | USP8 | AGAAAGAGAAACUGAGGAA | NM_005154 |
| 3796 | USP8 | GAAACAAGAAGCUGAAGAA | NM_005154 |
| 3797 | USP8 | GAAGGAAGAACAAGAACAA | NM_005154 |
| 3798 | USP8 | GCAAAGAGGGGCAAAGAAA | NM_005154 |
| 3799 | USP8 | GGAAAGGGCCUAUGUACUA | NM_005154 |
| 3800 | USP8 | CAAAGAAAUAACAGGAGUA | NM_005154 |
| 3801 | USP8 | CCAAGAAAGAAGAUAAAGA | NM_005154 |
| 3802 | USP8 | CUGAUAAUCGGAAGAGAUA | NM_005154 |
| 3803 | USP8 | AGAAGUUAAACCAGAGAAA | NM_005154 |
| 3804 | USP8 | ACAAGAAGCUGAAGAAAAU | NM_005154 |
| 3805 | USP8 | GCAAUGAGCCUUUGGUUUU | NM_005154 |
| 3806 | USP8 | GUGAACAGGCCAAGAAAGA | NM_005154 |
| 3807 | USP8 | GGCCAAGAAAGAAGAUAAA | NM_005154 |
| 3808 | USP8 | AGGCCAAGAAAGAAGAUAA | NM_005154 |
| 3809 | USP8 | GAGCAAUGGUGAAAAGAAU | NM_005154 |
| 3810 | USP8 | GAAGAGAAGAGGAAGCCAA | NM_005154 |
| 3811 | USP8 | GAUUAAAGGACAACCAGAA | NM_005154 |
| 3812 | USP8 | CAGACGAUACCGAAAGAAA | NM_005154 |
| 3813 | USP8 | GGAAAGGCAGCAAGAGGAA | NM_005154 |
| 3814 | USP9X | UGAGAGAAGUGUACGGAAA | NM_021906 |
| 3815 | USP9X | CCUUAGAGAUGGAGCAAGA | NM_004652 |
| 3816 | USP9X | ACAAAUGACAAAUGGGUUA | NM_004652 |
| 3817 | USP9X | GGGAUGAUGUAUUUGGAUA | NM_004652 |
| 3818 | USP9X | GUGGAGAUGGUGAGAGAAA | NM_004652 |
| 3819 | USP9X | GAGAGAAAUCGCUGGUAUA | NM_021906 |
| 3820 | USP9X | GAGCACAGCAAGAGAGAGA | NM_004652 |
| 3821 | USP9X | GGGUCGUGAUUCAGAGUAA | NM_004652 |
| 3822 | USP9X | AGACACAGCUUCUGAAAUU | NM_021906 |
| 3823 | USP9X | CCAAGAUGCUCCAGAUGAA | NM_004652 |
| 3824 | USP9X | GAACAAGUUAUGUGAAGAA | NM_004652 |
| 3825 | USP9X | GGGAUGAGAAGCAGGACAA | NM_004652 |
| 3826 | USP9X | CCAAAGGAAUGGUGGAGAU | NM_004652 |
| 3827 | USP9X | CAGAAUGGAUACAGCAGAA | NM_004652 |
| 3828 | USP9X | GCAAAGGUGUAUAUAGUAU | NM_004652 |
| 3829 | USP9X | CCUCAAUGCUCUUAAAAUA | NM_004652 |
| 3830 | USP9X | UGACAAAGACAGUGUUAAU | NM_004652 |
| 3831 | USP9X | CUGCAGUAAUUCAGAGGAA | NM_004652 |
| 3832 | USP9X | ACACGAUGCUUUAGAAUUU | NM_021906 |
| 3833 | USP9X | AGGCACAGGUAGUGAUGUA | NM_004652 |
| 3834 | USP9X | CAGAAAACCUUGUAACUUA | NM_004652 |
| 3835 | USP9X | GGAAUGGCUUGGAGAUGAA | NM_004652 |
| 3836 | USP9X | CUAUACAACUAAAGCGAUU | NM_021906 |
| 3837 | USP9X | ACGAAUGGCAGAAUGGAUA | NM_004652 |
| 3838 | USP9X | AGACUUAGAUCCUGAUAUU | NM_004652 |
| 3839 | USP9X | GGACAAGAAGAAACUGUUA | NM_004652 |
| 3840 | USP9X | UAUUAAACCAUUUGGGCAA | NM_004652 |
| 3841 | USP9X | AGAAAUGGUUCCACAGUUU | NM_004652 |
| 3842 | USP9X | GGUGGAUAGUUUAGAUGAA | NM_004652 |
| 3843 | USP9X | GAUGAGGCUUCAAGAUAUA | NM_021906 |
| 3844 | USP9Y | GGUGGUAACUUUUGAAUUA | NM_004654 |
| 3845 | USP9Y | GGAAAGAGAAUGUGCAAUU | NM_004654 |
| 3846 | USP9Y | UUUAAGAAGUGGAGAACUA | NM_004654 |
| 3847 | USP9Y | ACAAAUGACAAGUGGGUAA | NM_004654 |
| 3848 | USP9Y | CAGCAAGAGAGAAGGGUAA | NM_004654 |
| 3849 | USP9Y | GAAAUAACUUCUUGCCAAA | NM_004654 |
| 3850 | USP9Y | AGGCACAGGUAGUGAUUUA | NM_004654 |
| 3851 | USP9Y | UCGAAUGGUUAGAGUAUUA | NM_004654 |
| 3852 | USP9Y | GCAAUAAGCUGGAGGUGGA | NM_004654 |
| 3853 | USP9Y | GAACUUAGCUUCAAGAAUU | NM_004654 |
| 3854 | USP9Y | CCAAAUACAGAUAUGGAAA | NM_004654 |
| 3855 | USP9Y | GCGAAUGGCAGAAUGGAUA | NM_004654 |
| 3856 | USP9Y | GAGAGAGUGUAGUGAUUAA | NM_004654 |
| 3857 | USP9Y | GGAAUGAAAUGCUUUGAAA | NM_004654 |
| 3858 | USP9Y | GGUUAUAUCUAGUGUAUCA | NM_004654 |
| 3859 | USP9Y | GAACAGUAUUCUUGCAAUU | NM_004654 |
| 3860 | USP9Y | GCAGAGAGCUUGGAGAUAA | NM_004654 |
| 3861 | USP9Y | CAGAAGAGGUGGUGGAAUG | NM_004654 |
| 3862 | USP9Y | GUAUUUAAGAAGUGGAGAA | NM_004654 |
| 3863 | USP9Y | GAGAUGAUGUAUUUGGAUA | NM_004654 |
| 3864 | USP9Y | GGCAAAGAAUGAAGCCAAA | NM_004654 |
| 3865 | USP9Y | AAUUAGGGCUAUACAGAAA | NM_004654 |
| 3866 | USP9Y | UAACAGAGCUAUAGAUCUU | NM_004654 |
| 3867 | USP9Y | AAACACAGCUUCUGAAAUU | NM_004654 |
| 3868 | USP9Y | CAGCAUUAAUUGUGCAAGA | NM_004654 |
| 3869 | USP9Y | GGACAAGAUGAGACUAUAA | NM_004654 |
| 3870 | USP9Y | CCAAGUUACUCAUGAUCAA | NM_004654 |
| 3871 | USP9Y | AGGCAAAGAAUGAAGCCAA | NM_004654 |
| 3872 | VCIP135 | CAGAAGGACUGGAGUGAUA | NM_025054 |
| 3873 | VCIP135 | GGGACAGACUUUAGUAAUA | NM_025054 |
| 3874 | VCIP135 | GAUCCAAGAGCUAGGGAAA | NM_025054 |
| 3875 | VCIP135 | GGAAGAGUGGUCAGAGAAA | NM_025054 |
| 3876 | VCIP135 | CAGCAUGGCGACAGAAUUA | NM_025054 |
| 3877 | VCIP135 | CGACAGAAUUACAAUAGAA | NM_025054 |
| 3878 | VCIP135 | GCGAAAGGUCAGAGGAGAU | NM_025054 |
| 3879 | VCIP135 | AGUAAUAGUUCCACCUAAA | NM_025054 |
| 3880 | VCIP135 | AAACAGAAGUUGUGAGUUC | NM_025054 |
| 3881 | VCIP135 | CAAUGAAACUUGUUACCAA | NM_025054 |
| 3882 | VCIP135 | GGAUAAUCGCCUUCACAAA | NM_025054 |
| 3883 | VCIP135 | GGUCAGAGAAACAGUAUAU | NM_025054 |
| 3884 | VCIP135 | AGAGAAGUGCACUGGGAAA | NM_025054 |
| 3885 | VCIP135 | CCUCAUAGAACCAGAGCAU | NM_025054 |
| 3886 | VCIP135 | GACAGAAGUUUGCAAGAUA | NM_025054 |
| 3887 | VCIP135 | GGUGAAUUUGGGAGUGAAA | NM_025054 |
| 3888 | VCIP135 | UGGAGAUGUUCAAGGACAA | NM_025054 |
| 3889 | VCIP135 | CAACAUUCCUCCAUAUUUA | NM_025054 |
| 3890 | VCIP135 | UGGCAUGCCUUAAGAGAGA | NM_025054 |
| 3891 | VCIP135 | GAAAGUAUAGCCAGAGAAU | NM_025054 |
| 3892 | VCIP135 | GAGAAGAAGAUCCGAAUCA | NM_025054 |
| 3893 | VCIP135 | UGGUUGAGGCCCAGCGAAA | NM_025054 |
| 3894 | VCIP135 | CCGACAACUUCUAAGGAGA | NM_025054 |
| 3895 | VCIP135 | GGUCAGAGGAGAUGGGUCU | NM_025054 |
| 3896 | VCIP135 | CAGACUAUGGAAUGAGUAA | NM_025054 |
| 3897 | VCIP135 | UUGAAGAGAUGGAUAGUCA | NM_025054 |
| 3898 | VCIP135 | GAGUAGUAACAAUGAGAGA | NM_025054 |
| 3899 | VCIP135 | GUGGAAGAGUGGUCAGAGA | NM_025054 |
| 3900 | VCIP135 | GGAUGGUGGUUGUGUUAUU | NM_025054 |
| 3901 | VCIP135 | AGGAGUUAAACAUGAGUAA | NM_025054 |
| 3902 | VDU1 | CCUCAGAACAUUUGGGAUA | NM_015017 |
| 3903 | VDU1 | UGAAAGUAGUAGUCAGAAA | NM_015017 |
| 3904 | VDU1 | GAGAAGAUGUGCAAUAAGA | NM_015017 |
| 3905 | VDU1 | GGAUGAAGAAGAUGAACUU | NM_015017 |
| 3906 | VDU1 | GCUAAAGCAAUGUUGUUAA | NM_015017 |
| 3907 | ZA20D1 | GAUCAUGAAUGGAGGAAUA | NM_020205 |
| 3908 | ZA20D1 | GCAGCAAGCUCAAGAAGAA | NM_020205 |
| 3909 | ZA20D1 | UGAAAGUACUUGAGGAUCA | NM_020205 |
| 3910 | ZA20D1 | AGAAGGAGGCAGAGAGGAA | NM_020205 |
| 3911 | ZA20D1 | AGGAAAUGAUCCAGCGCUA | NM_020205 |
| 3912 | ZA20D1 | CGUUUGAACUGGUGGGUGA | NM_020205 |
| 3913 | ZA20D1 | CCAGCAGAGUCGAGGGCAA | NM_020205 |
| 3914 | ZA20D1 | CCAUGGAGCAGAAGGAGAA | NM_020205 |
| 3915 | ZA20D1 | GCUGAAAGUACUUGAGGAU | NM_020205 |
| 3916 | ZA20D1 | GGACAAGAAGAGAGCAGAU | NM_020205 |
| 3917 | ZA20D1 | CAGCAGACACAGCAGAAUA | NM_020205 |
| 3918 | ZA20D1 | ACUUACAGAUUCAGAGUAU | NM_020205 |
| 3919 | ZA20D1 | GGGACAGGGUUGGGAGGAA | NM_020205 |
| 3920 | ZA20D1 | CCAUAGUCGUCGUGGCAGA | NM_020205 |
| 3921 | ZA20D1 | AGGAGAAGUCAAAGCGAGA | NM_020205 |
| 3922 | ZA20D1 | GGGACUUGAUGCUGCGGAA | NM_020205 |
| 3923 | ZA20D1 | GCAGCUUCAUAGAGAGAGA | NM_020205 |
| 3924 | ZA20D1 | GGAGAAUACCAAGGAACAA | NM_020205 |
| 3925 | ZA20D1 | AGGAGAAUACCAAGGAACA | NM_020205 |
| 3926 | RANGB1 | GAACAAAUCCGGAGAGAGA | NM_017580 |
| 3927 | RANGB1 | CCAAAGACCUAGUGGAACA | NM_017580 |
| 3928 | RANGB1 | GAGAGGAAGAUGAGGAUGA | NM_017580 |
| 3929 | RANGB1 | GCCCAAAGACCUAGUGGAA | NM_017580 |
| 3930 | RANGB1 | ACAAAUCCGGAGAGAGAUA | NM_017580 |
| 3931 | RANGB1 | GGAAGUUGCAGUAGUGGUA | NM_017580 |
| 3932 | RANGB1 | GAGAGAAGAACAAUGGCAA | NM_017580 |
| 3933 | RANGB1 | GGGGAGAAACUUUAGGAUA | NM_017580 |
| 3934 | RANGB1 | GUAAUGAGGAACAGCAAGA | NM_017580 |
| 3935 | RANGB1 | GCAGGAUAUGCUAGCAAUA | NM_017580 |
| 3936 | RANGB1 | UGUCCAGACUCUAGUGCAA | NM_017580 |
| 3937 | RANGB1 | CCUAAUAACAUUGAAGCAA | NM_017580 |
| 3938 | RANGB1 | GGACUCAGUGCUUCGGAAA | NM_017580 |
| 3939 | RANGB1 | GGAUGAUGAAGAUGAAUGA | NM_017580 |
| 3940 | RANGB1 | CCGAGGUGCUGGUGCUAAU | NM_017580 |

[0370] Thus, consistent with Example XVII, the present invention provides an siRNA that targets a nucleotide sequence for a deubiquitination enzymes, wherein the siRNA is selected from the group consisting of SEQ. ID NOs. 438-3940.

[0371] In another embodiment, an siRNA is provided, said siRNA comprising a sense region and an antisense region, wherein said sense region and said antisense region are at least 90% complementary, said sense region and said antisense region together form a duplex region comprising 18-30 base pairs, and said sense region comprises a sequence that is at least 90% similar to a sequence selected from the group consisting of: SEQ. ID NOs 438-3940.

[0372] In another embodiment, an siRNA is provided wherein the siRNA comprises a sense region and an antisense region, wherein said sense region and said antisense region are at least 90% complementary, said sense region and said antisense region together form a duplex region comprising 18-30 base pairs, and said sense region comprises a sequence that is identical to a contiguous stretch of at least 18 bases of a sequence selected from the group consisting of: SEQ. ID NOs 438-3940.

[0373] In another embodiment, an siRNA is provided wherein the siRNA comprises a sense region and an antisense region, wherein said sense region and said antisense region are at least 90% complementary, said sense region and said antisense region together form a duplex region comprising 19-30 base pairs, and said sense region comprises a sequence that is identical to a contiguous stretch of at least 18 bases of a sequence selected from the group consisting of: SEQ. ID NOs 438-3940.

[0374] In another embodiment, a pool of at least two siRNAs is provided, wherein said pool comprises a first siRNA and a second siRNA, said first siRNA comprises a duplex region of length 18-30 base pairs that has a first sense region that is at least 90% similar to 18 bases of a first sequence selected from the group consisting of: SEQ. ID NOs 438-3940 and said second siRNA comprises a duplex region of length 18-30 base pairs that has a second sense region that is at least 90% similar to 18 bases of a second sequence selected from the group consisting of: SEQ. ID NOs 438-3940 and wherein said first sense region and said second sense region are not identical.

[0375] In another embodiment, a pool of at least two siRNAs is provided, wherein said pool comprises a first siRNA and a second siRNA, said first siRNA comprises a duplex region of length 18-30 base pairs that has a first sense region that is identical to at least 18 bases of a sequence selected from the group consisting of: SEQ. ID NOs 438-3940 and wherein the second siRNA comprises a second sense region that comprises a sequence that is identical to at least 18 bases of a sequence selected from the group consisting of: SEQ. ID NOs 438-3940.

[0376] In another embodiment, a pool of at least two siRNAs is provided, wherein said pool comprises a first siRNA and a second siRNA, said first siRNA comprises a duplex region of length 19-30 base pairs and has a first sense region comprising a sequence that is at least 90% similar to a sequence selected from the group consisting of: SEQ. ID NOs 438-3940, and said duplex of said second siRNA is 19-30 base pairs and comprises a second sense region that comprises a sequence that is at least 90% similar to a sequence selected from the group consisting of: SEQ. ID NOs 438-3940.

[0377] In another embodiment, a pool of at least two siRNAs is provided, wherein said pool comprises a first siRNA and a second siRNA, said first siRNA comprises a duplex region of length 19-30 base pairs and has a first sense region comprising a sequence that is identical to at least 18 bases of a sequence selected the group consisting of: SEQ. ID NOs 438-3940 and said duplex of said second siRNA is 19-30 base pairs and comprises a second sense region comprising a sequence that is identical to a sequence selected from the group consisting of: SEQ. ID NOs 438-3940.

[0378] In each of the aforementioned embodiments, preferably the antisense region is at least 90% complementary to a contiguous stretch of bases of one of the NCBI sequences identified in Example XVII; each of the recited NCBI sequences is incorporated by reference as if set forth fully herein. In some embodiments, the antisense region is 100% complementary to a contiguous stretch of bases of one of the NCBI sequences identified in Example XVII.

[0379] Further, in some embodiments that are directed to siRNA duplexes in which the antisense region is 20-30 bases in length, preferably there is a stretch of 19 bases that is at least 90%, more preferably 100% complementary to the recited sequence id number and the entire antisense region is at least 90% and more preferably 100% complementary to a contiguous stretch of bases of one of the NCBI sequences identified in Example XVII.

[0380] While the invention has been described in connection with specific embodiments thereof, it will be understood that it is capable of further modifications and this application is intended to cover any variations, uses, or adaptations of the invention following, in general, the principles of the invention and including such departure from the present disclosure as come within known or customary practice within the art to which the invention pertains and as may be applied to the essential features hereinbefore set forth and as follows in the scope of the appended claims.

The application's sequence listing, which the Patent Office published only in electronic form, follows.

SEQUENCE LISTING (3940 sequences)

SEQ ID NO: 1 - RNA, 19 nt, Artificial Sequence
  Synthetic
  misc_feature 1-2, 4, 6-9, 12, 15-18: n is any nucleotide
nnanannnnucnaannnna

SEQ ID NO: 2 - RNA, 19 nt, Artificial Sequence
  Synthetic
  misc_feature 1-2, 4, 6-9, 12, 15-18: n is any nucleotide
nnanannnnugnaannnna

SEQ ID NO: 3 - RNA, 19 nt, Artificial Sequence
  Synthetic
  misc_feature 1-2, 4, 6-9, 12, 15-18: n is any nucleotide
nnanannnnuunaannnna

SEQ ID NO: 4 - RNA, 19 nt, Artificial Sequence
  Synthetic
  misc_feature 1-2, 4, 6-9, 12, 15-18: n is any nucleotide
nnanannnnucncannnna

SEQ ID NO: 5 - RNA, 19 nt, Artificial Sequence
  Synthetic
  misc_feature 1-2, 4, 6-9, 12, 15-18: n is any nucleotide
nnanannnnugncannnna

SEQ ID NO: 6 - RNA, 19 nt, Artificial Sequence
  Synthetic
  misc_feature 1-2, 4, 6-9, 12, 15-18: n is any nucleotide
nnanannnnuuncannnna

SEQ ID NO: 7 - RNA, 19 nt, Artificial Sequence
  Synthetic
  misc_feature 1-2, 4, 6-9, 12, 15-18: n is any nucleotide
nnanannnnucnuannnna

SEQ ID NO: 8 - RNA, 19 nt, Artificial Sequence
  Synthetic
  misc_feature 1-2, 4, 6-9, 12, 15-18: n is any nucleotide
nnanannnnugnuannnna

SEQ ID NO: 9 - RNA, 19 nt, Artificial Sequence
  Synthetic
  misc_feature 1-2, 4, 6-9, 12, 15-18: n is any nucleotide
nnanannnnuunuannnna

SEQ ID NO: 10 - RNA, 19 nt, Artificial Sequence
  Synthetic
  misc_feature 1-2, 4, 6-9, 12, 15-18: n is any nucleotide
nnancnnnnucnaannnna

SEQ ID NO: 11 - RNA, 19 nt, Artificial Sequence
  Synthetic
  misc_feature 1-2, 4, 6-9, 12, 15-18: n is any nucleotide
nnancnnnnugnaannnna

SEQ ID NO: 12 - RNA, 19 nt, Artificial Sequence
  Synthetic
  misc_feature 1-2, 4, 6-9, 12, 15-18: n is any nucleotide
nnancnnnnuunaannnna

SEQ ID NO: 13 - RNA, 19 nt, Artificial Sequence
  Synthetic
  misc_feature 1-2, 4, 6-9, 12, 15-18: n is any nucleotide
nnancnnnnucncannnna

SEQ ID NO: 14 - RNA, 19 nt, Artificial Sequence
  Synthetic
  misc_feature 1-2, 4, 6-9, 12, 15-18: n is any nucleotide
nnancnnnnugncannnna

SEQ ID NO: 15 - RNA, 19 nt, Artificial Sequence
  Synthetic
  misc_feature 1-2, 4, 6-9, 12, 15-18: n is any nucleotide
nnancnnnnuuncannnna

SEQ ID NO: 16 - RNA, 19 nt, Artificial Sequence
  Synthetic
  misc_feature 1-2, 4, 6-9, 12, 15-18: n is any nucleotide
nnancnnnnucnuannnna

SEQ ID NO: 17 - RNA, 19 nt, Artificial Sequence
  Synthetic
  misc_feature 1-2, 4, 6-9, 12, 15-18: n is any nucleotide
nnancnnnnugnuannnna

SEQ ID NO: 18 - RNA, 19 nt, Artificial Sequence
  Synthetic
  misc_feature 1-2, 4, 6-9, 12, 15-18: n is any nucleotide
nnancnnnnuunuannnna

SEQ ID NO: 19 - RNA, 19 nt, Artificial Sequence
  Synthetic
  misc_feature 1-2, 4, 6-9, 12, 15-18: n is any nucleotide
nnangnnnnucnaannnna

SEQ ID NO: 20 - RNA, 19 nt, Artificial Sequence
  Synthetic
  misc_feature 1-2, 4, 6-9, 12, 15-18: n is any nucleotide
nnangnnnnugnaannnna

SEQ ID NO: 21 - RNA, 19 nt, Artificial Sequence
  Synthetic
  misc_feature 1-2, 4, 6-9, 12, 15-18: n is any nucleotide
nnangnnnnuunaannnna

SEQ ID NO: 22 - RNA, 19 nt, Artificial Sequence
  Synthetic
  misc_feature 1-2, 4, 6-9, 12, 15-18: n is any nucleotide
nnangnnnnucncannnna

SEQ ID NO: 23 - RNA, 19 nt, Artificial Sequence
  Synthetic
  misc_feature 1-2, 4, 6-9, 12, 15-18: n is any nucleotide
nnangnnnnugncannnna

SEQ ID NO: 24 - RNA, 19 nt, Artificial Sequence
  Synthetic
  misc_feature 1-2, 4, 6-9, 12, 15-18: n is any nucleotide
nnangnnnnuuncannnna

SEQ ID NO: 25 - RNA, 19 nt, Artificial Sequence
  Synthetic
  misc_feature 1-2, 4, 6-9, 12, 15-18: n is any nucleotide
nnangnnnnucnuannnna

SEQ ID NO: 26 - RNA, 19 nt, Artificial Sequence
  Synthetic
  misc_feature 1-2, 4, 6-9, 12, 15-18: n is any nucleotide
nnangnnnnugnuannnna

SEQ ID NO: 27 - RNA, 19 nt, Artificial Sequence
  Synthetic
  misc_feature 1-2, 4, 6-9, 12, 15-18: n is any nucleotide
nnangnnnnuunuannnna

SEQ ID NO: 28 - RNA, 22 nt, Artificial Sequence
  Synthetic
  misc_feature 4-5,7,9-12,15,18-21: n is any nucleotide
gucnnanannnnucnaannnna

SEQ ID NO: 29 - DNA, 208 bp, Homo sapiens
  misc_feature (1)...(208): human cyclophilin fragment
gttccaaaaacagtggataattttgtggccttagctacaggagagaaaggatttggctacaaaaacagcaaattccatcgtgtaatcaaggacttcatgatccagggcggagacttcaccaggggagatggcacaggaggaaagagcatctacggtgagcgcttccccgatgagaacttcaaactgaagcactacgggcctggctggg

SEQ ID NO: 30 - DNA, 200 bp, Photinus pyralis
  misc_feature (1)...(200): firefly luciferase fragment
tgaacttcccgccgccgttgttgttttggagcacggaaagacgatgacggaaaaagagatcgtggattacgtcgccagtcaagtaacaaccgcgaaaaagttgcgcggaggagttgtgtttgtggacgaagtaccgaaaggtcttaccggaaaactcgacgcaagaaaaatcagagagatcctcataaaggccaagaagg

SEQ ID NO: 31 - DNA, 108 bp, Homo sapiens
  misc_feature (1)...(108): human DBL fragment
acgggcaaggccaagtgggatgcctggaatgagctgaaagggacttccaaggaagatgccatgaaagcttacatcaacaaagtagaagagctaaagaaaaaatacggg

SEQ ID NO: 32 - RNA, 19 nt, Artificial Sequence
  Synthetic
guuccaaaaacaguggaua

SEQ ID NO: 33 - RNA, 19 nt, Artificial Sequence
  Synthetic
cccaaaaacaguggauaau

SEQ ID NO: 34 - RNA, 19 nt, Artificial Sequence
  Synthetic
caaaaacaguggauaauuu

SEQ ID NO: 35 - RNA, 19 nt, Artificial Sequence
  Synthetic
aaaacaguggauaauuuug

SEQ ID NO: 36 - RNA, 19 nt, Artificial Sequence
  Synthetic
aacaguggauaauuuugug

SEQ ID NO: 37 - RNA, 19 nt, Artificial Sequence
  Synthetic
caguggauaauuuuguggc

SEQ ID NO: 38 - RNA, 19 nt, Artificial Sequence
  Synthetic
guggauaauuuuguggccu

SEQ ID NO: 39 - RNA, 19 nt, Artificial Sequence
  Synthetic
ggauaauuuuguggccuua

SEQ ID NO: 40 - RNA, 19 nt, Artificial Sequence
  Synthetic
auaauuuuguggccuuagc

SEQ ID NO: 41 - RNA, 19 nt, Artificial Sequence
  Synthetic
aauuuuguggccuuagcua

SEQ ID NO: 42 - RNA, 19 nt, Artificial Sequence
  Synthetic
uuuuguggccuuagcuaca

SEQ ID NO: 43 - RNA, 19 nt, Artificial Sequence
  Synthetic
uuguggccuuagcuacagg

SEQ ID NO: 44 - RNA, 19 nt, Artificial Sequence
  Synthetic
guggccuuagcuacaggag

SEQ ID NO: 45 - RNA, 19 nt, Artificial Sequence
  Synthetic
ggccuuagcuacaggagag

SEQ ID NO: 46 - RNA, 19 nt, Artificial Sequence
  Synthetic
ccuuagcuacaggagagaa

SEQ ID NO: 47 - RNA, 19 nt, Artificial Sequence
  Synthetic
uuagcuacaggagagaaag

SEQ ID NO: 48 - RNA, 19 nt, Artificial Sequence
  Synthetic
agcuacaggagagaaagga

SEQ ID NO: 49 - RNA, 19 nt, Artificial Sequence
  Synthetic
cuacaggagagaaaggauu

SEQ ID NO: 50 - RNA, 19 nt, Artificial Sequence
  Synthetic
acaggagagaaaggauuug

SEQ ID NO: 51 - RNA, 19 nt, Artificial Sequence
  Synthetic
aggagagaaaggauuuggc

SEQ ID NO: 52 - RNA, 19 nt, Artificial Sequence
  Synthetic
gagagaaaggauuuggcua

SEQ ID NO: 53 - RNA, 19 nt, Artificial Sequence
  Synthetic
gagaaaggauuuggcuaca

SEQ ID NO: 54 - RNA, 19 nt, Artificial Sequence
  Synthetic
gaaaggauuuggcuacaaa

SEQ ID NO: 55 - RNA, 19 nt, Artificial Sequence
  Synthetic
aaggauuuggcuacaaaaa

SEQ ID NO: 56 - RNA, 19 nt, Artificial Sequence
  Synthetic
ggauuuggcuacaaaaaca

SEQ ID NO: 57 - RNA, 19 nt, Artificial Sequence
  Synthetic
auuuggcuacaaaaacagc

SEQ ID NO: 58 - RNA, 19 nt, Artificial Sequence
  Synthetic
uuggcuacaaaaacagcaa

SEQ ID NO: 59 - RNA, 19 nt, Artificial Sequence
  Synthetic
ggcuacaaaaacagcaaau

SEQ ID NO: 60 - RNA, 19 nt, Artificial Sequence
  Synthetic
cuacaaaaacagcaaauuc

SEQ ID NO: 61 - RNA, 19 nt, Artificial Sequence
  Synthetic
acaaaaacagcaaauucca

SEQ ID NO: 62 - RNA, 19 nt, Artificial Sequence
  Synthetic
aaaaacagcaaauuccauc

SEQ ID NO: 63 - RNA, 19 nt, Artificial Sequence
  Synthetic
aaacagcaaauuccaucgu

SEQ ID NO: 64 - RNA, 19 nt, Artificial Sequence
  Synthetic
acagcaaauuccaucgugu

SEQ ID NO: 65 - RNA, 19 nt, Artificial Sequence
  Synthetic
agcaaauuccaucguguaa

SEQ ID NO: 66 - RNA, 19 nt, Artificial Sequence
  Synthetic
caaauuccaucguguaauc

SEQ ID NO: 67 - RNA, 19 nt, Artificial Sequence
  Synthetic
aauuccaucguguaaucaa

SEQ ID NO: 68 - RNA, 19 nt, Artificial Sequence
  Synthetic
uuccaucguguaaucaagg

SEQ ID NO: 69 - RNA, 19 nt, Artificial Sequence
  Synthetic
ccaucguguaaucaaggac

SEQ ID NO: 70 - RNA, 19 nt, Artificial Sequence
  Synthetic
aucguguaaucaaggacuu

SEQ ID NO: 71 - RNA, 19 nt, Artificial Sequence
  Synthetic
cguguaaucaaggacuuca

SEQ ID NO: 72 - RNA, 19 nt, Artificial Sequence
  Synthetic
uguaaucaaggacuucaug

SEQ ID NO: 73 - RNA, 19 nt, Artificial Sequence
  Synthetic
uaaucaaggacuucaugau

SEQ ID NO: 74 - RNA, 19 nt, Artificial Sequence
  Synthetic
aucaaggacuucaugaucc

SEQ ID NO: 75 - RNA, 19 nt, Artificial Sequence
  Synthetic
caaggacuucaugauccag

SEQ ID NO: 76 - RNA, 19 nt, Artificial Sequence
  Synthetic
aggacuucaugauccaggg

SEQ ID NO: 77 - RNA, 19 nt, Artificial Sequence
  Synthetic
gacuucaugauccagggcg

SEQ ID NO: 78 - RNA, 19 nt, Artificial Sequence
  Synthetic
cuucaugauccagggcgga

SEQ ID NO: 79 - RNA, 19 nt, Artificial Sequence
  Synthetic
ucaugauccagggcggaga

SEQ ID NO: 80 - RNA, 19 nt, Artificial Sequence
  Synthetic
augauccagggcggagacu

SEQ ID NO: 81 - RNA, 19 nt, Artificial Sequence
  Synthetic
gauccagggcggagacuuc

SEQ ID NO: 82 - RNA, 19 nt, Artificial Sequence
  Synthetic
uccagggcggagacuucac

SEQ ID NO: 83 - RNA, 19 nt, Artificial Sequence
  Synthetic
cagggcggagacuucacca

SEQ ID NO: 84 - RNA, 19 nt, Artificial Sequence
  Synthetic
gggcggagacuucaccagg

SEQ ID NO: 85 - RNA, 19 nt, Artificial Sequence
  Synthetic
gcggagacuucaccagggg

SEQ ID NO: 86 - RNA, 19 nt, Artificial Sequence
  Synthetic
ggagacuucaccaggggag

SEQ ID NO: 87 - RNA, 19 nt, Artificial Sequence
  Synthetic
agacuucaccaggggagau

SEQ ID NO: 88 - RNA, 19 nt, Artificial Sequence
  Synthetic
acuucaccaggggagaugg

SEQ ID NO: 89 - RNA, 19 nt, Artificial Sequence
  Synthetic
uucaccaggggagauggca

SEQ ID NO: 90 - RNA, 19 nt, Artificial Sequence
  Synthetic
caccaggggagauggcaca

SEQ ID NO: 91 - RNA, 19 nt, Artificial Sequence
  Synthetic
ccaggggagauggcacagg

SEQ ID NO: 92 - RNA, 19 nt, Artificial Sequence
  Synthetic
aggggagauggcacaggag

SEQ ID NO: 93 - RNA, 19 nt, Artificial Sequence
  Synthetic
gggagauggcacaggagga

SEQ ID NO: 94 - RNA, 19 nt, Artificial Sequence
  Synthetic
gagauggcacaggaggaaa

SEQ ID NO: 95 - RNA, 19 nt, Artificial Sequence
  Synthetic
gauggcacaggaggaaaga

SEQ ID NO: 96 - RNA, 19 nt, Artificial Sequence
  Synthetic
uggcacaggaggaaagagc

SEQ ID NO: 97 - RNA, 19 nt, Artificial Sequence
  Synthetic
gcacaggaggaaagagcau

SEQ ID NO: 98 - RNA, 19 nt, Artificial Sequence
  Synthetic
acaggaggaaagagcaucu

SEQ ID NO: 99 - RNA, 19 nt, Artificial Sequence
  Synthetic
aggaggaaagagcaucuac

SEQ ID NO: 100 - RNA, 19 nt, Artificial Sequence
  Synthetic
gaggaaagagcaucuacgg

SEQ ID NO: 101 - RNA, 19 nt, Artificial Sequence
  Synthetic
ggaaagagcaucuacggug

SEQ ID NO: 102 - RNA, 19 nt, Artificial Sequence
  Synthetic
aaagagcaucuacggugag

SEQ ID NO: 103 - RNA, 19 nt, Artificial Sequence
  Synthetic
agagcaucuacggugagcg

SEQ ID NO: 104 - RNA, 19 nt, Artificial Sequence
  Synthetic
agcaucuacggugagcgcu

SEQ ID NO: 105 - RNA, 19 nt, Artificial Sequence
  Synthetic
caucuacggugagcgcuuc

SEQ ID NO: 106 - RNA, 19 nt, Artificial Sequence
  Synthetic
ucuacggugagcgcuuccc

SEQ ID NO: 107 - RNA, 19 nt, Artificial Sequence
  Synthetic
uacggugagcgcuuccccg

SEQ ID NO: 108 - RNA, 19 nt, Artificial Sequence
  Synthetic
cggugagcgcuuccccgau

SEQ ID NO: 109 - RNA, 19 nt, Artificial Sequence
  Synthetic
gugagcgcuuccccgauga

SEQ ID NO: 110 - RNA, 19 nt, Artificial Sequence
  Synthetic
gagcgcuuccccgaugaga

SEQ ID NO: 111 - RNA, 19 nt, Artificial Sequence
  Synthetic
gcgcuuccccgaugagaac

SEQ ID NO: 112 - RNA, 19 nt, Artificial Sequence
  Synthetic
gcuuccccgaugagaacuu

SEQ ID NO: 113 - RNA, 19 nt, Artificial Sequence
  Synthetic
uuccccgaugagaacuuca

SEQ ID NO: 114 - RNA, 19 nt, Artificial Sequence
  Synthetic
ccccgaugagaacuucaaa

SEQ ID NO: 115 - RNA, 19 nt, Artificial Sequence
  Synthetic
ccgaugagaacuucaaacu

SEQ ID NO: 116 - RNA, 19 nt, Artificial Sequence
  Synthetic
gaugagaacuucaaacuga

SEQ ID NO: 117 - RNA, 19 nt, Artificial Sequence
  Synthetic
ugagaacuucaaacugaag

SEQ ID NO: 118 - RNA, 19 nt, Artificial Sequence
  Synthetic
agaacuucaaacugaagca

SEQ ID NO: 119 - RNA, 19 nt, Artificial Sequence
  Synthetic
aacuucaaacugaagcacu

SEQ ID NO: 120 - RNA, 19 nt, Artificial Sequence
  Synthetic
cuucaaacugaagcacuac

SEQ ID NO: 121 - RNA, 19 nt, Artificial Sequence
  Synthetic
ucaaacugaagcacuacgg

SEQ ID NO: 122 - RNA, 19 nt, Artificial Sequence
  Synthetic
acgggcaaggccaaguggg

SEQ ID NO: 123 - RNA, 19 nt, Artificial Sequence
  Synthetic
cgggcaaggccaaguggga

SEQ ID NO: 124 - RNA, 19 nt, Artificial Sequence
  Synthetic
gggcaaggccaagugggau

SEQ ID NO: 125 - RNA, 19 nt, Artificial Sequence
  Synthetic
ggcaaggccaagugggaug

SEQ ID NO: 126 - RNA, 19 nt, Artificial Sequence
  Synthetic
gcaaggccaagugggaugc

SEQ ID NO: 127 - RNA, 19 nt, Artificial Sequence
  Synthetic
caaggccaagugggaugcc

SEQ ID NO: 128 - RNA, 19 nt, Artificial Sequence
  Synthetic
aaggccaagugggaugccu

SEQ ID NO: 129 - RNA, 19 nt, Artificial Sequence
  Synthetic
aggccaagugggaugccug

SEQ ID NO: 130 - RNA, 19 nt, Artificial Sequence
  Synthetic
ggccaagugggaugccugg

SEQ ID NO: 131 - RNA, 19 nt, Artificial Sequence
  Synthetic
gccaagugggaugccugga

SEQ ID NO: 132 - RNA, 19 nt, Artificial Sequence
  Synthetic
ccaagugggaugccuggaa

SEQ ID NO: 133 - RNA, 19 nt, Artificial Sequence
  Synthetic
caagugggaugccuggaau

SEQ ID NO: 134 - RNA, 19 nt, Artificial Sequence
  Synthetic
aagugggaugccuggaaug

SEQ ID NO: 135 - RNA, 19 nt, Artificial Sequence
  Synthetic
agugggaugccuggaauga

SEQ ID NO: 136 - RNA, 19 nt, Artificial Sequence
  Synthetic
gugggaugccuggaaugag

SEQ ID NO: 137 - RNA, 19 nt, Artificial Sequence
  Synthetic
ugggaugccuggaaugagc

SEQ ID NO: 138 - RNA, 19 nt, Artificial Sequence
  Synthetic
gggaugccuggaaugagcu

SEQ ID NO: 139 - RNA, 19 nt, Artificial Sequence
  Synthetic
ggaugccuggaaugagcug

SEQ ID NO: 140 - RNA, 19 nt, Artificial Sequence
  Synthetic
gaugccuggaaugagcuga

SEQ ID NO: 141 - RNA, 19 nt, Artificial Sequence
  Synthetic
augccuggaaugagcugaa

SEQ ID NO: 142 - RNA, 19 nt, Artificial Sequence
  Synthetic
ugccuggaaugagcugaaa

SEQ ID NO: 143 - RNA, 19 nt, Artificial Sequence
  Synthetic
gccuggaaugagcugaaag

SEQ ID NO: 144 - RNA, 19 nt, Artificial Sequence
  Synthetic
ccuggaaugagcugaaagg

SEQ ID NO: 145 - RNA, 19 nt, Artificial Sequence
  Synthetic
cuggaaugagcugaaaggg

SEQ ID NO: 146 - RNA, 19 nt, Artificial Sequence
  Synthetic
uggaaugagcugaaaggga

SEQ ID NO: 147 - RNA, 19 nt, Artificial Sequence
  Synthetic
ggaaugagcugaaagggac

SEQ ID NO: 148 - RNA, 19 nt, Artificial Sequence
  Synthetic
gaaugagcugaaagggacu

SEQ ID NO: 149 - RNA, 19 nt, Artificial Sequence
  Synthetic
aaugagcugaaagggacuu

SEQ ID NO: 150 - RNA, 19 nt, Artificial Sequence
  Synthetic
augagcugaaagggacuuc

SEQ ID NO: 151 - RNA, 19 nt, Artificial Sequence
  Synthetic
ugagcugaaagggacuucc

SEQ ID NO: 152 - RNA, 19 nt, Artificial Sequence
  Synthetic
gagcugaaagggacuucca

SEQ ID NO: 153 - RNA, 19 nt, Artificial Sequence
  Synthetic
agcugaaagggacuuccaa

SEQ ID NO: 154 - RNA, 19 nt, Artificial Sequence
  Synthetic
gcugaaagggacuuccaag

SEQ ID NO: 155 - RNA, 19 nt, Artificial Sequence
  Synthetic
cugaaagggacuuccaagg

SEQ ID NO: 156 - RNA, 19 nt, Artificial Sequence
  Synthetic
ugaaagggacuuccaagga

SEQ ID NO: 157 - RNA, 19 nt, Artificial Sequence
  Synthetic
gaaagggacuuccaaggaa

SEQ ID NO: 158 - RNA, 19 nt, Artificial Sequence
  Synthetic
aaagggacuuccaaggaag

SEQ ID NO: 159 - RNA, 19 nt, Artificial Sequence
  Synthetic
aagggacuuccaaggaaga

SEQ ID NO: 160 - RNA, 19 nt, Artificial Sequence
  Synthetic
agggacuuccaaggaagau

SEQ ID NO: 161 - RNA, 19 nt, Artificial Sequence
  Synthetic
gggacuuccaaggaagaug

SEQ ID NO: 162 - RNA, 19 nt, Artificial Sequence
  Synthetic
ggacuuccaaggaagaugc

SEQ ID NO: 163 - RNA, 19 nt, Artificial Sequence
  Synthetic
gacuuccaaggaagaugcc

SEQ ID NO: 164 - RNA, 19 nt, Artificial Sequence
  Synthetic
acuuccaaggaagaugcca

SEQ ID NO: 165 - RNA, 19 nt, Artificial Sequence
  Synthetic
cuuccaaggaagaugccau

SEQ ID NO: 166 - RNA, 19 nt, Artificial Sequence
  Synthetic
uuccaaggaagaugccaug

SEQ ID NO: 167 - RNA, 19 nt, Artificial Sequence
  Synthetic
uccaaggaagaugccauga

SEQ ID NO: 168 - RNA, 19 nt, Artificial Sequence
  Synthetic
ccaaggaagaugccaugaa

SEQ ID NO: 169 - RNA, 19 nt, Artificial Sequence
  Synthetic
caaggaagaugccaugaaa

SEQ ID NO: 170 - RNA, 19 nt, Artificial Sequence
  Synthetic
aaggaagaugccaugaaag

SEQ ID NO: 171 - RNA, 19 nt, Artificial Sequence
  Synthetic
aggaagaugccaugaaagc

SEQ ID NO: 172 - RNA, 19 nt, Artificial Sequence
  Synthetic
ggaagaugccaugaaagcu

SEQ ID NO: 173 - RNA, 19 nt, Artificial Sequence
  Synthetic
gaagaugccaugaaagcuu

SEQ ID NO: 174 - RNA, 19 nt, Artificial Sequence
  Synthetic
aagaugccaugaaagcuua

SEQ ID NO: 175 - RNA, 19 nt, Artificial Sequence
  Synthetic
agaugccaugaaagcuuac

SEQ ID NO: 176 - RNA, 19 nt, Artificial Sequence
  Synthetic
gaugccaugaaagcuuaca

SEQ ID NO: 177 - RNA, 19 nt, Artificial Sequence
  Synthetic
augccaugaaagcuuacau

SEQ ID NO: 178 - RNA, 19 nt, Artificial Sequence
  Synthetic
ugccaugaaagcuuacauc

SEQ ID NO: 179 - RNA, 19 nt, Artificial Sequence
  Synthetic
gccaugaaagcuuacauca

SEQ ID NO: 180 - RNA, 19 nt, Artificial Sequence
  Synthetic
ccaugaaagcuuacaucaa

SEQ ID NO: 181 - RNA, 19 nt, Artificial Sequence
  Synthetic
caugaaagcuuacaucaac

SEQ ID NO: 182 - RNA, 19 nt, Artificial Sequence
  Synthetic
augaaagcuuacaucaaca

SEQ ID NO: 183 - RNA, 19 nt, Artificial Sequence
  Synthetic
ugaaagcuuacaucaacaa

SEQ ID NO: 184 - RNA, 19 nt, Artificial Sequence
  Synthetic
gaaagcuuacaucaacaaa

SEQ ID NO: 185 - RNA, 19 nt, Artificial Sequence
  Synthetic
aaagcuuacaucaacaaag

SEQ ID NO: 186 - RNA, 19 nt, Artificial Sequence
  Synthetic
aagcuuacaucaacaaagu

SEQ ID NO: 187 - RNA, 19 nt, Artificial Sequence
  Synthetic
agcuuacaucaacaaagua

SEQ ID NO: 188 - RNA, 19 nt, Artificial Sequence
  Synthetic
agcuuacaucacaaaguag

SEQ ID NO: 189 - RNA, 19 nt, Artificial Sequence
  Synthetic
cuuacaucaacaaaguaga

SEQ ID NO: 190 - RNA, 19 nt, Artificial Sequence
  Synthetic
uuacaucaacaaaguagaa

SEQ ID NO: 191 - RNA, 19 nt, Artificial Sequence
  Synthetic
uacaucaacaaaguagaag

SEQ ID NO: 192 - RNA, 19 nt, Artificial Sequence
  Synthetic
acaucaacaaaguagaaga

SEQ ID NO: 193 - RNA, 19 nt, Artificial Sequence
  Synthetic
caucaacaaaguagaagag

SEQ ID NO: 194 - RNA, 19 nt, Artificial Sequence
  Synthetic
aucaacaaaguagaagagc

SEQ ID NO: 195 - RNA, 19 nt, Artificial Sequence
  Synthetic
ucaacaaaguagaagagcu

SEQ ID NO: 196 - RNA, 19 nt, Artificial Sequence
  Synthetic
caacaaaguagaagagcua

SEQ ID NO: 197 - RNA, 19 nt, Artificial Sequence
  Synthetic
aacaaaguagaagagcuaa

SEQ ID NO: 198 - RNA, 19 nt, Artificial Sequence
  Synthetic
acaaaguagaagagcuaaa

SEQ ID NO: 199 - RNA, 19 nt, Artificial Sequence
  Synthetic
caaaguagaagagcuaaag

SEQ ID NO: 200 - RNA, 19 nt, Artificial Sequence
  Synthetic
aaaguagaagagcuaaaga

SEQ ID NO: 201 - RNA, 19 nt, Artificial Sequence
  Synthetic
aaguagaagagcuaaagaa

SEQ ID NO: 202 - RNA, 19 nt, Artificial Sequence
  Synthetic
aguagaagagcuaaagaaa

SEQ ID NO: 203 - RNA, 19 nt, Artificial Sequence
  Synthetic
guagaagagcuaaagaaaa

SEQ ID NO: 204 - RNA, 19 nt, Artificial Sequence
  Synthetic
uagaagagcuaaagaaaaa

SEQ ID NO: 205 - RNA, 19 nt, Artificial Sequence
  Synthetic
agaagagcuaaagaaaaaa

SEQ ID NO: 206 - RNA, 19 nt, Artificial Sequence
  Synthetic
gaagagcuaaagaaaaaau

SEQ ID NO: 207 - RNA, 19 nt, Artificial Sequence
  Synthetic
aagagcuaaagaaaaaaua

SEQ ID NO: 208 - RNA, 19 nt, Artificial Sequence
  Synthetic
agagcuaaagaaaaaauac

SEQ ID NO: 209 - RNA, 19 nt, Artificial Sequence
  Synthetic
gagcuaaagaaaaaauacg

SEQ ID NO: 210 - RNA, 19 nt, Artificial Sequence
  Synthetic
agcuaaagaaaaaauacgg

SEQ ID NO: 211 - RNA, 19 nt, Artificial Sequence
  Synthetic
gcuaaagaaaaaauacggg

SEQ ID NO: 212 - RNA, 19 nt, Artificial Sequence
  Synthetic
auccucauaaaggccaaga

SEQ ID NO: 213 - RNA, 19 nt, Artificial Sequence
  Synthetic
agauccucauaaaggccaa

SEQ ID NO: 214 - RNA, 19 nt, Artificial Sequence
  Synthetic
agagauccucauaaaggcc

SEQ ID NO: 215 - RNA, 19 nt, Artificial Sequence
  Synthetic
agagagauccucauaaagg

SEQ ID NO: 216 - RNA, 19 nt, Artificial Sequence
  Synthetic
ucagagagauccucauaaa

SEQ ID NO: 217 - RNA, 19 nt, Artificial Sequence
  Synthetic
aaucagagagauccucaua

SEQ ID NO: 218 - RNA, 19 nt, Artificial Sequence
  Synthetic
aaaaucagagagauccuca

SEQ ID NO: 219 - RNA, 19 nt, Artificial Sequence
  Synthetic
gaaaaaucagagagauccu

SEQ ID NO: 220 - RNA, 19 nt, Artificial Sequence
  Synthetic
aagaaaaaucagagagauc

SEQ ID NO: 221 - RNA, 19 nt, Artificial Sequence
  Synthetic
gcaagaaaaaucagagaga

SEQ ID NO: 222 - RNA, 19 nt, Artificial Sequence
  Synthetic
acgcaagaaaaaucagaga

SEQ ID NO: 223 - RNA, 19 nt, Artificial Sequence
  Synthetic
cgacgcaagaaaaaucaga

SEQ ID NO: 224 - RNA, 19 nt, Artificial Sequence
  Synthetic
cucgacgcaagaaaaauca

SEQ ID NO: 225 - RNA, 19 nt, Artificial Sequence
  Synthetic
aacucgacgcaagaaaaau

SEQ ID NO: 226 - RNA, 19 nt, Artificial Sequence
  Synthetic
aaaacucgacgcaagaaaa

SEQ ID NO: 227 - RNA, 19 nt, Artificial Sequence
  Synthetic
ggaaaacucgacgcaagaa

SEQ ID NO: 228 - RNA, 19 nt, Artificial Sequence
  Synthetic
ccggaaaacucgacgcaag

SEQ ID NO: 229 - RNA, 19 nt, Artificial Sequence
  Synthetic
uaccggaaaacucgacgca

SEQ ID NO: 230 - RNA, 19 nt, Artificial Sequence
  Synthetic
cuuaccggaaaacucgacg

SEQ ID NO: 231 - RNA, 19 nt, Artificial Sequence
  Synthetic
gucuuaccggaaaacucga

SEQ ID NO: 232 - RNA, 19 nt, Artificial Sequence
  Synthetic
aggucuuaccggaaaacuc

SEQ ID NO: 233 - RNA, 19 nt, Artificial Sequence
  Synthetic
aaaggucuuaccggaaaac

SEQ ID NO: 234 - RNA, 19 nt, Artificial Sequence
  Synthetic
cgaaaggucuuaccggaaa

SEQ ID NO: 235 - RNA, 19 nt, Artificial Sequence
  Synthetic
accgaaaggucuuaccgga

SEQ ID NO: 236 - RNA, 19 nt, Artificial Sequence
  Synthetic
guaccgaaaggucuuaccg

SEQ ID NO: 237 - RNA, 19 nt, Artificial Sequence
  Synthetic
aaguaccgaaaggucuuac

SEQ ID NO: 238 - RNA, 19 nt, Artificial Sequence
  Synthetic
cgaaguaccgaaaggucuu

SEQ ID NO: 239 - RNA, 19 nt, Artificial Sequence
  Synthetic
gacgaaguaccgaaagguc

SEQ ID NO: 240 - RNA, 19 nt, Artificial Sequence
  Synthetic
uggacgaaguaccgaaagg

SEQ ID NO: 241 - RNA, 19 nt, Artificial Sequence
  Synthetic
uguggacgaaguaccgaaa

SEQ ID NO: 242 - RNA, 19 nt, Artificial Sequence
  Synthetic
uuuguggacgaaguaccga

SEQ ID NO: 243 - RNA, 19 nt, Artificial Sequence
  Synthetic
uguuuguggacgaaguacc

SEQ ID NO: 244 - RNA, 19 nt, Artificial Sequence
  Synthetic
uguguuuguggacgaagua

SEQ ID NO: 245 - RNA, 19 nt, Artificial Sequence
  Synthetic
guuguguuuguggacgaag

SEQ ID NO: 246 - RNA, 19 nt, Artificial Sequence
  Synthetic
gaguuguguuuguggacga

SEQ ID NO: 247 - RNA, 19 nt, Artificial Sequence
  Synthetic
aggaguuguguuuguggac

SEQ ID NO: 248 - RNA, 19 nt, Artificial Sequence
  Synthetic
ggaggaguuguguuugugg

SEQ ID NO: 249 - RNA, 19 nt, Artificial Sequence
  Synthetic
gcggaggaguuguguuugu

SEQ ID NO: 250 - RNA, 19 nt, Artificial Sequence
  Synthetic
gcgcggaggaguuguguuu

SEQ ID NO: 251 - RNA, 19 nt, Artificial Sequence
  Synthetic
uugcgcggaggaguugugu

SEQ ID NO: 252 - RNA, 19 nt, Artificial Sequence
  Synthetic
aguugcgcggaggaguugu

SEQ ID NO: 253 - RNA, 19 nt, Artificial Sequence
  Synthetic
aaaguugcgcggaggaguu

SEQ ID NO: 254 - RNA, 19 nt, Artificial Sequence
  Synthetic
aaaaaguugcgcggaggag

SEQ ID NO: 255 - RNA, 19 nt, Artificial Sequence
  Synthetic
cgaaaaaguugcgcggagg

SEQ ID NO: 256 - RNA, 19 nt, Artificial Sequence
  Synthetic
cgcgaaaaaguugcgcgga

SEQ ID NO: 257 - RNA, 19 nt, Artificial Sequence
  Synthetic
accgcgaaaaaguugcgcg

SEQ ID NO: 258 - RNA, 19 nt, Artificial Sequence
  Synthetic
caaccgcgaaaaaguugcg

SEQ ID NO: 259 - RNA, 19 nt, Artificial Sequence
  Synthetic
aacaaccgcgaaaaaguug

SEQ ID NO: 260 - RNA, 19 nt, Artificial Sequence
  Synthetic
guaacaaccgcgaaaaagu

SEQ ID NO: 261 - RNA, 19 nt, Artificial Sequence
  Synthetic
aaguaacaaccgcgaaaaa

SEQ ID NO: 262 - RNA, 19 nt, Artificial Sequence
  Synthetic
ucaaguaacaaccgcgaaa

SEQ ID NO: 263 - RNA, 19 nt, Artificial Sequence
  Synthetic
agucaaguaacaaccgcga

SEQ ID NO: 264 - RNA, 19 nt, Artificial Sequence
  Synthetic
ccagucaaguaacaaccgc

SEQ ID NO: 265 - RNA, 19 nt, Artificial Sequence
  Synthetic
cgccagucaaguaacaacc

SEQ ID NO: 266 - RNA, 19 nt, Artificial Sequence
  Synthetic
gucgccagucaaguaacaa

SEQ ID NO: 267 - RNA, 19 nt, Artificial Sequence
  Synthetic
acgucgccagucaaguaac

SEQ ID NO: 268 - RNA, 19 nt, Artificial Sequence
  Synthetic
uuacgucgccagucaagua

SEQ ID NO: 269 - RNA, 19 nt, Artificial Sequence
  Synthetic
gauuacgucgccagucaag

SEQ ID NO: 270 - RNA, 19 nt, Artificial Sequence
  Synthetic
uggauuacgucgccaguca

SEQ ID NO: 271 - RNA, 19 nt, Artificial Sequence
  Synthetic
cguggauuacgucgccagu

SEQ ID NO: 272 - RNA, 19 nt, Artificial Sequence
  Synthetic
aucguggauuacgucgcca

SEQ ID NO: 273 - RNA, 19 nt, Artificial Sequence
  Synthetic
agaucguggauuacgucgc

SEQ ID NO: 274 - RNA, 19 nt, Artificial Sequence
  Synthetic
agagaucguggauuacguc

SEQ ID NO: 275 - RNA, 19 nt, Artificial Sequence
  Synthetic
aaagagaucguggauuacg

SEQ ID NO: 276 - RNA, 19 nt, Artificial Sequence
  Synthetic
aaaaagagaucguggauua

SEQ ID NO: 277 - RNA, 18 nt, Artificial Sequence
  Synthetic
gaaaaagagaucguggau

SEQ ID NO: 278 - RNA, 19 nt, Artificial Sequence
  Synthetic
acggaaaaagagaucgugg

SEQ ID NO: 279 - RNA, 19 nt, Artificial Sequence
  Synthetic
ugacggaaaaagagaucgu

SEQ ID NO: 280 - RNA, 19 nt, Artificial Sequence
  Synthetic
gaugacggaaaaagagauc

SEQ ID NO: 281 - RNA, 19 nt, Artificial Sequence
  Synthetic
acgaugacggaaaaagaga

SEQ ID NO: 282 - RNA, 19 nt, Artificial Sequence
  Synthetic
agacgaugacggaaaaaga

SEQ ID NO: 283 - RNA, 19 nt, Artificial Sequence
  Synthetic
aaagacgaugacggaaaaa

SEQ ID NO: 284 - RNA, 19 nt, Artificial Sequence
  Synthetic
ggaaagacgaugacggaaa

SEQ ID NO: 285 - RNA, 19 nt, Artificial Sequence
  Synthetic
acggaaagacgaugacgga

SEQ ID NO: 286 - RNA, 19 nt, Artificial Sequence
  Synthetic
gcacggaaagacgaugacg

SEQ ID NO: 287 - RNA, 19 nt, Artificial Sequence
  Synthetic
gagcacggaaagacgauga

SEQ ID NO: 288 - RNA, 19 nt, Artificial Sequence
  Synthetic
uggagcacggaaagacgau

SEQ ID NO: 289 - RNA, 19 nt, Artificial Sequence
  Synthetic
uuuggagcacggaaagacg

SEQ ID NO: 290 - RNA, 19 nt, Artificial Sequence
  Synthetic
guuuuggagcacggaaaga

SEQ ID NO: 291 - RNA, 19 nt, Artificial Sequence
  Synthetic
uuguuuuggagcacggaaa

SEQ ID NO: 292 - RNA, 19 nt, Artificial Sequence
  Synthetic
uguuguuuuggagcacgga

SEQ ID NO: 293 - RNA, 19 nt, Artificial Sequence
  Synthetic
guuguuguuuuggagcacg

SEQ ID NO: 294 - RNA, 19 nt, Artificial Sequence
  Synthetic
ccguuguuguuuuggagca

SEQ ID NO: 295 - RNA, 19 nt, Artificial Sequence
  Synthetic
cgccguuguuguuuuggag

SEQ ID NO: 296 - RNA, 19 nt, Artificial Sequence
  Synthetic
gccgccguuguuguuuugg

SEQ ID NO: 297 - RNA, 19 nt, Artificial Sequence
  Synthetic
ccgccgccguuguuguuuu

SEQ ID NO: 298 - RNA, 19 nt, Artificial Sequence
  Synthetic
ucccgccgccguuguuguu

SEQ ID NO: 299 - RNA, 19 nt, Artificial Sequence
  Synthetic
cuucccgccgccguuguug

SEQ ID NO: 300 - RNA, 19 nt, Artificial Sequence
  Synthetic
aacuucccgccgccguugu

SEQ ID NO: 301 - RNA, 19 nt, Artificial Sequence
  Synthetic
ugaacuucccgccgccguu

SEQ ID NO: 302 - RNA, 19 nt, Artificial Sequence
  Synthetic
gggagauagugaugaagua

SEQ ID NO: 303 - RNA, 19 nt, Artificial Sequence
  Synthetic
gaaguacauccauuauaag

SEQ ID NO: 304 - RNA, 19 nt, Artificial Sequence
  Synthetic
guacgacaaccgggagaua

SEQ ID NO: 305 - RNA, 19 nt, Artificial Sequence
  Synthetic
agauagugaugaaguacau

SEQ ID NO: 306 - RNA, 19 nt, Artificial Sequence
  Synthetic
ugaagacucugcucaguuu

SEQ ID NO: 307 - RNA, 19 nt, Artificial Sequence
  Synthetic
gcaugcggccucuguuuga

SEQ ID NO: 308 - RNA, 19 nt, Artificial Sequence
  Synthetic
ugcggccucuguuugauuu

SEQ ID NO: 309 - RNA, 19 nt, Artificial Sequence
  Synthetic
gagauagugaugaaguaca

SEQ ID NO: 310 - RNA, 19 nt, Artificial Sequence
  Synthetic
ggagauagugaugaaguac

SEQ ID NO: 311 - RNA, 19 nt, Artificial Sequence
  Synthetic
gaagacucugcucaguuug

SEQ ID NO: 312 - DNA, 19 bp, Artificial Sequence
  Synthetic
gaaagaatctgtagagaaa

SEQ ID NO: 313 - DNA, 19 bp, Artificial Sequence
  Synthetic
gcaatgagctgtttgaaga

SEQ ID NO: 314 - DNA, 19 bp, Artificial Sequence
  Synthetic
tgacaaaggtggataaatt

SEQ ID NO: 315 - DNA, 19 bp, Artificial Sequence
  Synthetic
ggaaatggatctctttgaa

SEQ ID NO: 316 - DNA, 19 bp, Artificial Sequence
  Synthetic
ggaaagtaatggtccaaca

SEQ ID NO: 317 - DNA, 19 bp, Artificial Sequence
  Synthetic
agacagttatgcagctatt

SEQ ID NO: 318 - DNA, 19 bp, Artificial Sequence
  Synthetic
ccaattctcggaagcaaga

SEQ ID NO: 319 - DNA, 19 bp, Artificial Sequence
  Synthetic
gaaagtaatggtccaacag

SEQ ID NO: 320 - DNA, 19 bp, Artificial Sequence
  Synthetic
gcgccagagtgaacaagta

SEQ ID NO: 321 - DNA, 19 bp, Artificial Sequence
  Synthetic
gaaggtggcccagctatgt

SEQ ID NO: 322 - DNA, 19 bp, Artificial Sequence
  Synthetic
ggaaccagcgccagagtga

SEQ ID NO: 323 - DNA, 19 bp, Artificial Sequence
  Synthetic
gagcgagattgcaggcata

SEQ ID NO: 324 - DNA, 19 bp, Artificial Sequence
  Synthetic
gttagtatctgatgacttg

SEQ ID NO: 325 - DNA, 19 bp, Artificial Sequence
  Synthetic
gaaatggaaccactaagaa

SEQ ID NO: 326 - DNA, 19 bp, Artificial Sequence
  Synthetic
ggaaatggaaccactaaga

SEQ ID NO: 327 - DNA, 19 bp, Artificial Sequence
  Synthetic
caactacactttccaatgc

SEQ ID NO: 328 - DNA, 19 bp, Artificial Sequence
  Synthetic
ccaccaagatttcatgata

SEQ ID NO: 329 - DNA, 19 bp, Artificial Sequence
  Synthetic
gatcggaactccaacaaga

SEQ ID NO: 330 - DNA, 19 bp, Artificial Sequence
  Synthetic
aaacggagctacagattat

SEQ ID NO: 331 - DNA, 19 bp, Artificial Sequence
  Synthetic
ccacacagcattcttgtaa

SEQ ID NO: 332 - DNA, 19 bp, Artificial Sequence
  Synthetic
gaagttaccttgagcaatc

SEQ ID NO: 333 - DNA, 19 bp, Artificial Sequence
  Synthetic
ggacttggccgatccagaa

SEQ ID NO: 334 - DNA, 19 bp, Artificial Sequence
  Synthetic
gcacttggatcgagatgag

SEQ ID NO: 335 - DNA, 19 bp, Artificial Sequence
  Synthetic
caaagaccaattcgcgtta

SEQ ID NO: 336 - DNA, 19 bp, Artificial Sequence
  Synthetic
ccgaatcaatcgcatcttc

SEQ ID NO: 337 - DNA, 19 bp, Artificial Sequence
  Synthetic
gacatgatcctgcagttca

SEQ ID NO: 338 - DNA, 19 bp, Artificial Sequence
  Synthetic
gagcgaatcgtcaccactt

SEQ ID NO: 339 - DNA, 19 bp, Artificial Sequence
  Synthetic
cctccgagctggcgtctac

SEQ ID NO: 340 - DNA, 19 bp, Artificial Sequence
  Synthetic
tcacatggttaacctctaa

SEQ ID NO: 341 - DNA, 19 bp, Artificial Sequence
  Synthetic
gatgagggacgccataatc

SEQ ID NO: 342 - DNA, 19 bp, Artificial Sequence
  Synthetic
cctctaactacaaatctta

SEQ ID NO: 343 - DNA, 19 bp, Artificial Sequence
  Synthetic
ggaaggtgctatccaaaat

SEQ ID NO: 344 - DNA, 19 bp, Artificial Sequence
  Synthetic
gcaagcaagtcctaacatt

SEQ ID NO: 345 - DNA, 19 bp, Artificial Sequence
  Synthetic
ggaagaggagtagacctta

SEQ ID NO: 346 - DNA, 19 bp, Artificial Sequence
  Synthetic
aggaatcagtgttgtagta

SEQ ID NO: 347 - DNA, 19 bp, Artificial Sequence
  Synthetic
gaagaggagtagaccttac

SEQ ID NO: 348 - DNA, 19 bp, Artificial Sequence
  Synthetic
gaaagtcaagcctggtatt

SEQ ID NO: 349 - DNA, 19 bp, Artificial Sequence
  Synthetic
aaagtcaagcctggtatta

SEQ ID NO: 350 - DNA, 19 bp, Artificial Sequence
  Synthetic
gctatgaacgtgaatgatc

SEQ ID NO: 351 - DNA, 19 bp, Artificial Sequence
  Synthetic
caagcctggtattacgttt

SEQ ID NO: 352 - DNA, 19 bp, Artificial Sequence
  Synthetic
ggaacaagatctgtcaatt

SEQ ID NO: 353 - DNA, 19 bp, Artificial Sequence
  Synthetic
gcaatgaacgtgaacgaaa

SEQ ID NO: 354 - DNA, 19 bp, Artificial Sequence
  Synthetic
caatgaacgtgaacgaaat

SEQ ID NO: 355 - DNA, 19 bp, Artificial Sequence
  Synthetic
ggacaggagcggtatcaca

SEQ ID NO: 356 - DNA, 19 bp, Artificial Sequence
  Synthetic
agacagagcttgagaataa

SEQ ID NO: 357 - DNA, 19 bp, Artificial Sequence
  Synthetic
gagaagatctttatgcaaa

SEQ ID NO: 358 - DNA, 19 bp, Artificial Sequence
  Synthetic
gaagagaaatcagcagata

SEQ ID NO: 359 - DNA, 19 bp, Artificial Sequence
  Synthetic
gcaagtaactcaactaaca

SEQ ID NO: 360 - DNA, 19 bp, Artificial Sequence
  Synthetic
gagctaatctgccacattg

SEQ ID NO: 361 - DNA, 19 bp, Artificial Sequence
  Synthetic
gcagatgagttactagaaa

SEQ ID NO: 362 - DNA, 19 bp, Artificial Sequence
  Synthetic
caacttaattgtccagaaa

SEQ ID NO: 363 - DNA, 19 bp, Artificial Sequence
  Synthetic
caacacaggattctgataa

SEQ ID NO: 364 - DNA, 19 bp, Artificial Sequence
  Synthetic
agattgtgcctaagtctct

SEQ ID NO: 365 - DNA, 19 bp, Artificial Sequence
  Synthetic
atgaagatctggaggtgaa

SEQ ID NO: 366 - DNA, 19 bp, Artificial Sequence
  Synthetic
tttgagacttcttgcctaa

SEQ ID NO: 367 - DNA, 19 bp, Artificial Sequence
  Synthetic
agatcaccctccttaaata

SEQ ID NO: 368 - DNA, 19 bp, Artificial Sequence
  Synthetic
caacggatttggtcgtatt

SEQ ID NO: 369 - DNA, 19 bp, Artificial Sequence
  Synthetic
gaaatcccatcaccatctt

SEQ ID NO: 370 - DNA, 19 bp, Artificial Sequence
  Synthetic
gacctcaactacatggttt

SEQ ID NO: 371 - DNA, 19 bp, Artificial Sequence
  Synthetic
tggtttacatgttccaata

SEQ ID NO: 372 - DNA, 19 bp, Artificial Sequence
  Synthetic
gaagaaatcgatgttgttt

SEQ ID NO: 373 - DNA, 19 bp, Artificial Sequence
  Synthetic
acacaaacttgaacagcta

SEQ ID NO: 374 - DNA, 19 bp, Artificial Sequence
  Synthetic
ggaagaaatcgatgttgtt

SEQ ID NO: 375 - DNA, 19 bp, Artificial Sequence
  Synthetic
gaaacgacgagaacagttg

SEQ ID NO: 376 - DNA, 19 bp, Artificial Sequence
  Synthetic
gcacatggatggaggttct

SEQ ID NO: 377 - DNA, 19 bp, Artificial Sequence
  Synthetic
gcagagagagcagatttga

SEQ ID NO: 378 - DNA, 19 bp, Artificial Sequence
  Synthetic
gaggttctctggatcaagt

SEQ ID NO: 379 - DNA, 19 bp, Artificial Sequence
  Synthetic
gagcagatttgaagcaact

SEQ ID NO: 380 - DNA, 19 bp, Artificial Sequence
  Synthetic
caaagacgatgacttcgaa

SEQ ID NO: 381 - DNA, 19 bp, Artificial Sequence
  Synthetic
gatcagcatttgcatggaa

SEQ ID NO: 382 - DNA, 19 bp, Artificial Sequence
  Synthetic
tccaggagtttgtcaataa

SEQ ID NO: 383 - DNA, 19 bp, Artificial Sequence
  Synthetic
ggaagctgatccaccttga

SEQ ID NO: 384 - DNA, 19 bp, Artificial Sequence
  Synthetic
gcagaaatctaaggatata

SEQ ID NO: 385 - DNA, 19 bp, Artificial Sequence
  Synthetic
caacaaggatgaagtctat

SEQ ID NO: 386 - DNA, 19 bp, Artificial Sequence
  Synthetic
cagcagaaatctaaggata

SEQ ID NO: 387 - DNA, 19 bp, Artificial Sequence
  Synthetic
ctagatggctttctcagta

SEQ ID NO: 388 - DNA, 19 bp, Artificial Sequence
  Synthetic
agacaaggtcccaaagaca

SEQ ID NO: 389 - DNA, 19 bp, Artificial Sequence
  Synthetic
ggaatggcaagaccagcaa

SEQ ID NO: 390 - DNA, 19 bp, Artificial Sequence
  Synthetic
agaattattccagggttta

SEQ ID NO: 391 - DNA, 19 bp, Artificial Sequence
  Synthetic
gcagacaaggtcccaaaga

SEQ ID NO: 392 - DNA, 19 bp, Artificial Sequence
  Synthetic
agaagcagcttcaggatga

SEQ ID NO: 393 - DNA, 19 bp, Artificial Sequence
  Synthetic
gagcttgacttccagaaga

SEQ ID NO: 394 - DNA, 19 bp, Artificial Sequence
  Synthetic
ccaccgaagttcaccctaa

SEQ ID NO: 395 - DNA, 19 bp, Artificial Sequence
  Synthetic
gagaagagctcctccatca

SEQ ID NO: 396 - DNA, 19 bp, Artificial Sequence
  Synthetic
gaaagagcatctacggtga

SEQ ID NO: 397 - DNA, 19 bp, Artificial Sequence
  Synthetic
gaaaggatttggctacaaa

SEQ ID NO: 398 - DNA, 19 bp, Artificial Sequence
  Synthetic
acagcaaattccatcgtgt

SEQ ID NO: 399 - DNA, 19 bp, Artificial Sequence
  Synthetic
ggaaagactgttccaaaaa

SEQ ID NO: 400 - DNA, 19 bp, Artificial Sequence
  Synthetic
caacacgcctcatcctcta

SEQ ID NO: 401 - DNA, 19 bp, Artificial Sequence
  Synthetic
catgaaagcttacatcaac

SEQ ID NO: 402 - DNA, 19 bp, Artificial Sequence
  Synthetic
aagatgccatgaaagctta

SEQ ID NO: 403 - DNA, 19 bp, Artificial Sequence
  Synthetic
gcacataccgcctgagtct

SEQ ID NO: 404 - DNA, 19 bp, Artificial Sequence
  Synthetic
gatcaaatctgaagaagga

SEQ ID NO: 405 - DNA, 19 bp, Artificial Sequence
  Synthetic
gccaagaagtttcctaata

SEQ ID NO: 406 - DNA, 19 bp, Artificial Sequence
  Synthetic
cagcatatcttgaaccatt

SEQ ID NO: 407 - DNA, 19 bp, Artificial Sequence
  Synthetic
gaacaaaggaaacggatga

SEQ ID NO: 408 - DNA, 19 bp, Artificial Sequence
  Synthetic
cggaaacggtccaggctat

SEQ ID NO: 409 - DNA, 19 bp, Artificial Sequence
  Synthetic
gcttcgagcagacatgata

SEQ ID NO: 410 - DNA, 19 bp, Artificial Sequence
  Synthetic
cctacacggtcctcctata

SEQ ID NO: 411 - DNA, 19 bp, Artificial Sequence
  Synthetic
gccaagaacctcatcatct

SEQ ID NO: 412 - DNA, 19 bp, Artificial Sequence
  Synthetic
gatatgggctgaatacaaa

SEQ ID NO: 413 - DNA, 19 bp, Artificial Sequence
  Synthetic
gcactctgattgacaaata

SEQ ID NO: 414 - DNA, 19 bp, Artificial Sequence
  Synthetic
tgaagtctctgattaagta

SEQ ID NO: 415 - DNA, 19 bp, Artificial Sequence
  Synthetic
tcagagagatcctcataaa

SEQ ID NO: 416 - DNA, 19 bp, Artificial Sequence
  Synthetic
gcaagaagatcaccatttc

SEQ ID NO: 417 - DNA, 19 bp, Artificial Sequence
  Synthetic
gagagaaatttgaggatga

SEQ ID NO: 418 - DNA, 19 bp, Artificial Sequence
  Synthetic
gaaaggatttggctataag

SEQ ID NO: 419 - DNA, 19 bp, Artificial Sequence
  Synthetic
gaaagaaggcatgaacatt

SEQ ID NO: 420 - DNA, 19 bp, Artificial Sequence
  Synthetic
gggagatagtgatgaagta

SEQ ID NO: 421 - DNA, 19 bp, Artificial Sequence
  Synthetic
gaagtacatccattataag

SEQ ID NO: 422 - DNA, 19 bp, Artificial Sequence
  Synthetic
gtacgacaaccgggagata

SEQ ID NO: 423 - DNA, 19 bp, Artificial Sequence
  Synthetic
agatagtgatgaagtacat

SEQ ID NO: 424 - DNA, 19 bp, Artificial Sequence
  Synthetic
tgaagactctgctcagttt

SEQ ID NO: 425 - DNA, 19 bp, Artificial Sequence
  Synthetic
gcatgcggcctctgtttga

SEQ ID NO: 426 - RNA, 19 nt, Artificial Sequence
  Synthetic
gcacacagcuuacuacauc

SEQ ID NO: 427 - RNA, 19 nt, Artificial Sequence
  Synthetic
gaaaugcccugguaucuca

SEQ ID NO: 428 - RNA, 19 nt, Artificial Sequence
  Synthetic
gaaggaacgugaugugauc

SEQ ID NO: 429 - RNA, 19 nt, Artificial Sequence
  Synthetic
gcacuacuccuguguguga

SEQ ID NO: 430 - RNA, 19 nt, Artificial Sequence
  Synthetic
gaacccagcuggagaacuu

SEQ ID NO: 431 - RNA, 19 nt, Artificial Sequence
  Synthetic
gauauacagugugaucuua

SEQ ID NO: 432 - RNA, 19 nt, Artificial Sequence
  Synthetic
guacuacgauccugauuau

SEQ ID NO: 433 - RNA, 19 nt, Artificial Sequence
  Synthetic
gugccgaccuuuacaauuu

SEQ ID NO: 434 - DNA, 19 bp, Artificial Sequence
  Synthetic
gaaggaaactgaattcaaa

SEQ ID NO: 435 - DNA, 19 bp, Artificial Sequence
  Synthetic
ggaaatatgtactacgaaa

SEQ ID NO: 436 - DNA, 19 bp, Artificial Sequence
  Synthetic
ccacaaagcagtgaattta

SEQ ID NO: 437 - DNA, 19 bp, Artificial Sequence
  Synthetic
gtaacaagctcacgcagtt

SEQ ID NO: 438 - RNA, 19 nt, Artificial Sequence
  Synthetic
agaaggaagcagaggaauu

SEQ ID NO: 439 - RNA, 19 nt, Artificial Sequence
  Synthetic
cgguagaggugaaugaaga

SEQ ID NO: 440 - RNA, 19 nt, Artificial Sequence
  Synthetic
gggcaucaccugagaaaga

SEQ ID NO: 441 - RNA, 19 nt, Artificial Sequence
  Synthetic
gaagaaggaagcagaggaa

SEQ ID NO: 442 - RNA, 19 nt, Artificial Sequence
  Synthetic
caauaugaauggagcuuau

SEQ ID NO: 443 - RNA, 19 nt, Artificial Sequence
  Synthetic
gcucuggaguugagauuau

SEQ ID NO: 444 - RNA, 19 nt, Artificial Sequence
  Synthetic
guggaaaacugaugaggaa

SEQ ID NO: 445 - RNA, 19 nt, Artificial Sequence
  Synthetic
gaaagacacaguaaagaaa

SEQ ID NO: 446 - RNA, 19 nt, Artificial Sequence
  Synthetic
acacagagaacgaagaaga

SEQ ID NO: 447 - RNA, 19 nt, Artificial Sequence
  Synthetic
agaaagacacaguaaagaa

SEQ ID NO: 448 - RNA, 19 nt, Artificial Sequence
  Synthetic
gaaaagaaagacacaguaa

SEQ ID NO: 449 - RNA, 19 nt, Artificial Sequence
  Synthetic
gaaauuaaguagcucagaa

SEQ ID NO: 450 - RNA, 19 nt, Artificial Sequence
  Synthetic
caacagaagcagcagcaau

SEQ ID NO: 451 - RNA, 19 nt, Artificial Sequence
  Synthetic
gaacauggccauccagcaa

SEQ ID NO: 452 - RNA, 19 nt, Artificial Sequence
  Synthetic
gcuaacacaucccgaagaa

SEQ ID NO: 453 - RNA, 19 nt, Artificial Sequence
  Synthetic
ggagauugcauuucccaaa

SEQ ID NO: 454 - RNA, 19 nt, Artificial Sequence
  Synthetic
caacuguaacucagaaauu

SEQ ID NO: 455 - RNA, 19 nt, Artificial Sequence
  Synthetic
uuacaaaucugcugucauu

SEQ ID NO: 456 - RNA, 19 nt, Artificial Sequence
  Synthetic
cuagaaagcuuuggaaguu

SEQ ID NO: 457 - RNA, 19 nt, Artificial Sequence
  Synthetic
gaguugagauuauccgaau

SEQ ID NO: 458 - RNA, 19 nt, Artificial Sequence
  Synthetic
caacacagagaacgaagaa

SEQ ID NO: 459 - RNA, 19 nt, Artificial Sequence
  Synthetic
gaguagagauggagaggau

SEQ ID NO: 460 - RNA, 19 nt, Artificial Sequence
  Synthetic
aauagaaaccuguggaaua

SEQ ID NO: 461 - RNA, 19 nt, Artificial Sequence
  Synthetic
uggagaauguagaggaauu

SEQ ID NO: 462 - RNA, 19 nt, Artificial Sequence
  Synthetic
ugauagaggcagaaaggaa

SEQ ID NO: 463 - RNA, 19 nt, Artificial Sequence
  Synthetic
ugaagaaacugaaggagau

SEQ ID NO: 464 - RNA, 19 nt, Artificial Sequence
  Synthetic
gaagaaggaaauuuggaaa

SEQ ID NO: 465 - RNA, 19 nt, Artificial Sequence
  Synthetic
uaauacagugagaggaaua

SEQ ID NO: 466 - RNA, 19 nt, Artificial Sequence
  Synthetic
gaauguauuugcagaucaa

SEQ ID NO: 467 - RNA, 19 nt, Artificial Sequence
  Synthetic
uggaauacucuguggaaaa

SEQ ID NO: 468 - RNA, 19 nt, Artificial Sequence
  Synthetic
ggaccagacuauugugaca

SEQ ID NO: 469 - RNA, 19 nt, Artificial Sequence
  Synthetic
ucuaauacagugagaggaa

SEQ ID NO: 470 - RNA, 19 nt, Artificial Sequence
  Synthetic
acguagaauaccaagaaua

SEQ ID NO: 471 - RNA, 19 nt, Artificial Sequence
  Synthetic
cguagaauaccaagaauau

SEQ ID NO: 472 - RNA, 19 nt, Artificial Sequence
  Synthetic
agaguuagcccgaggucaa

SEQ ID NO: 473 - RNA, 19 nt, Artificial Sequence
  Synthetic
agagauugauagaggcaga

SEQ ID NO: 474 - RNA, 19 nt, Artificial Sequence
  Synthetic
uguauuuggaagaaggaaa

SEQ ID NO: 475 - RNA, 19 nt, Artificial Sequence
  Synthetic
cauggagaauguagaggaa

SEQ ID NO: 476 - RNA, 19 nt, Artificial Sequence
  Synthetic
augaagaaacugaaggaga

SEQ ID NO: 477 - RNA, 19 nt, Artificial Sequence
  Synthetic
ggaagaaggaaauuuggaa

SEQ ID NO: 478 - RNA, 19 nt, Artificial Sequence
  Synthetic
ggaauagaaaccuguggaa

SEQ ID NO: 479 - RNA, 19 nt, Artificial Sequence
  Synthetic
ucuaagugcuguucagaau

SEQ ID NO: 480 - RNA, 19 nt, Artificial Sequence
  Synthetic
ggagaauguagaggaauua

SEQ ID NO: 481 - RNA, 19 nt, Artificial Sequence
  Synthetic
ucaccaaagcauaaagaca

SEQ ID NO: 482 - RNA, 19 nt, Artificial Sequence
  Synthetic
gcauaaagacacuggcauc

SEQ ID NO: 483 - RNA, 19 nt, Artificial Sequence
  Synthetic
guggaauacucuguggaaa

SEQ ID NO: 484 - RNA, 19 nt, Artificial Sequence
  Synthetic
aauuggagcaucagagauu

SEQ ID NO: 485 - RNA, 19 nt, Artificial Sequence
  Synthetic
gcagaaaggaagcggauug

SEQ ID NO: 486 - RNA, 19 nt, Artificial Sequence
  Synthetic
ggucuggaguagagaugga

SEQ ID NO: 487 - RNA, 19 nt, Artificial Sequence
  Synthetic
cugaaaagcaggauauuau

SEQ ID NO: 488 - RNA, 19 nt, Artificial Sequence
  Synthetic
cuuccuaaccaucgagauu

SEQ ID NO: 489 - RNA, 19 nt, Artificial Sequence
  Synthetic
gagcaaaggauaugcgauu

SEQ ID NO: 490 - RNA, 19 nt, Artificial Sequence
  Synthetic
ccacaagucucaagaguca

SEQ ID NO: 491 - RNA, 19 nt, Artificial Sequence
  Synthetic
gagaagaggaagaaguuca

SEQ ID NO: 492 - RNA, 19 nt, Artificial Sequence
  Synthetic
gggugcaaguggaggagau

SEQ ID NO: 493 - RNA, 19 nt, Artificial Sequence
  Synthetic
cgugauugaugaugauauu

SEQ ID NO: 494 - RNA, 19 nt, Artificial Sequence
  Synthetic
ucuacgaccuucagagcaa

SEQ ID NO: 495 - RNA, 19 nt, Artificial Sequence
  Synthetic
gggucaucauggagcguau

SEQ ID NO: 496 - RNA, 19 nt, Artificial Sequence
  Synthetic
gagguagagaagaggaaga

SEQ ID NO: 497 - RNA, 19 nt, Artificial Sequence
  Synthetic
ucaaagagucccagaagga

SEQ ID NO: 498 - RNA, 19 nt, Artificial Sequence
  Synthetic
ccaucaacgucuuggcuga

SEQ ID NO: 499 - RNA, 19 nt, Artificial Sequence
  Synthetic
aggaugacgaggaggauga

SEQ ID NO: 500 - RNA, 19 nt, Artificial Sequence
  Synthetic
aggagguagagaagaggaa

SEQ ID NO: 501 - RNA, 19 nt, Artificial Sequence
  Synthetic
aggcugagauugcaaacua

SEQ ID NO: 502 - RNA, 19 nt, Artificial Sequence
  Synthetic
ucaaggaggagguagagaa

SEQ ID NO: 503 - RNA, 19 nt, Artificial Sequence
  Synthetic
uggaugggcugaaggucua

SEQ ID NO: 504 - RNA, 19 nt, Artificial Sequence
  Synthetic
ugucagugcugcagcccaa

SEQ ID NO: 505 - RNA, 19 nt, Artificial Sequence
  Synthetic
ccaaccuaguggagcagaa

SEQ ID NO: 506 - RNA, 19 nt, Artificial Sequence
  Synthetic
guagagaagaggaagaagu

SEQ ID NO: 507 - RNA, 19 nt, Artificial Sequence
  Synthetic
aggaugacuaugaggauga

SEQ ID NO: 508 - RNA, 19 nt, Artificial Sequence
  Synthetic
cagaugaugaggaugacua

SEQ ID NO: 509 - RNA, 19 nt, Artificial Sequence
  Synthetic
agagaaggacccacaacua

SEQ ID NO: 510 - RNA, 19 nt, Artificial Sequence
  Synthetic
cgguucugcugaugggcaa

SEQ ID NO: 511 - RNA, 19 nt, Artificial Sequence
  Synthetic
aggaagaaguucaagauug

SEQ ID NO: 512 - RNA, 19 nt, Artificial Sequence
  Synthetic
aggaaggcaugcuggccaa

SEQ ID NO: 513 - RNA, 19 nt, Artificial Sequence
  Synthetic
cuggaucaaugaaugaaua

SEQ ID NO: 514 - RNA, 19 nt, Artificial Sequence
  Synthetic
aacccaagcuaguggugaa

SEQ ID NO: 515 - RNA, 19 nt, Artificial Sequence
  Synthetic
ccaaggagcugcuggcacu

SEQ ID NO: 516 - RNA, 19 nt, Artificial Sequence
  Synthetic
agguauaaggggaagggaa

SEQ ID NO: 517 - RNA, 19 nt, Artificial Sequence
  Synthetic
gcagagacaggguugcuua

SEQ ID NO: 518 - RNA, 19 nt, Artificial Sequence
  Synthetic
ccuacaaggccaagcgcca

SEQ ID NO: 519 - RNA, 19 nt, Artificial Sequence
  Synthetic
gaugaugacuggaggcaaa

SEQ ID NO: 520 - RNA, 19 nt, Artificial Sequence
  Synthetic
uaaccuauccagagagaaa

SEQ ID NO: 521 - RNA, 19 nt, Artificial Sequence
  Synthetic
gauagaaguuugucaggua

SEQ ID NO: 522 - RNA, 19 nt, Artificial Sequence
  Synthetic
gugaggaagccuuuggaaa

SEQ ID NO: 523 - RNA, 19 nt, Artificial Sequence
  Synthetic
aguacagguuucaaggaua

SEQ ID NO: 524 - RNA, 19 nt, Artificial Sequence
  Synthetic
caggaaggacuuugaacua

SEQ ID NO: 525 - RNA, 19 nt, Artificial Sequence
  Synthetic
gcaguacagugcagagaau

SEQ ID NO: 526 - RNA, 19 nt, Artificial Sequence
  Synthetic
gcagcacagucaaugguaa

SEQ ID NO: 527 - RNA, 19 nt, Artificial Sequence
  Synthetic
ccucagaauuggagucucu

SEQ ID NO: 528 - RNA, 19 nt, Artificial Sequence
  Synthetic
gagcaggagaccucagaau

SEQ ID NO: 529 - RNA, 19 nt, Artificial Sequence
  Synthetic
agacauauaccaagagaag

SEQ ID NO: 530 - RNA, 19 nt, Artificial Sequence
  Synthetic
caggguggacugagaagaa

SEQ ID NO: 531 - RNA, 19 nt, Artificial Sequence
  Synthetic
ccaaacaggcucugcagau

SEQ ID NO: 532 - RNA, 19 nt, Artificial Sequence
  Synthetic
ucagguagucuaaggaaga

SEQ ID NO: 533 - RNA, 19 nt, Artificial Sequence
  Synthetic
ucacaaagcagaagaauua

SEQ ID NO: 534 - RNA, 19 nt, Artificial Sequence
  Synthetic
caagauagacuuugcagaa

SEQ ID NO: 535 - RNA, 19 nt, Artificial Sequence
  Synthetic
agauagacuuugcagaaau

SEQ ID NO: 536 - RNA, 19 nt, Artificial Sequence
  Synthetic
caaacaaugaaguggauga

SEQ ID NO: 537 - RNA, 19 nt, Artificial Sequence
  Synthetic
gugaauuuguggaagcaau

SEQ ID NO: 538 - RNA, 19 nt, Artificial Sequence
  Synthetic
acaaugaaguggaugacau

SEQ ID NO: 539 - RNA, 19 nt, Artificial Sequence
  Synthetic
gagauuacauaaacggaga

SEQ ID NO: 540 - RNA, 19 nt, Artificial Sequence
  Synthetic
guuucuugcucgagugcua

SEQ ID NO: 541 - RNA, 19 nt, Artificial Sequence
  Synthetic
gaugauaccuggaacccaa

SEQ ID NO: 542 - RNA, 19 nt, Artificial Sequence
  Synthetic
cagaaaugaagcaaaugaa

SEQ ID NO: 543 - RNA, 19 nt, Artificial Sequence
  Synthetic
gcagaaaugaagcaaauga

SEQ ID NO: 544 - RNA, 19 nt, Artificial Sequence
  Synthetic
ggagcuaugugaauuuaua

SEQ ID NO: 545 - RNA, 19 nt, Artificial Sequence
  Synthetic
cagcagugaauuuguggaa

SEQ ID NO: 546 - RNA, 19 nt, Artificial Sequence
  Synthetic
gggagaaugugaauacuca

SEQ ID NO: 547 - RNA, 19 nt, Artificial Sequence
  Synthetic
caacaaacaaugaagugga

SEQ ID NO: 548 - RNA, 19 nt, Artificial Sequence
  Synthetic
gaagcaaucugcauucaua

SEQ ID NO: 549 - RNA, 19 nt, Artificial Sequence
  Synthetic
gcacaaucaaacacaugaa

SEQ ID NO: 550 - RNA, 19 nt, Artificial Sequence
  Synthetic
ucugcaaagaugacauaaa

SEQ ID NO: 551 - RNA, 19 nt, Artificial Sequence
  Synthetic
ugacauaaagcaugggaac

SEQ ID NO: 552 - RNA, 19 nt, Artificial Sequence
  Synthetic
caaagaugacauaaagcau

SEQ ID NO: 553 - RNA, 19 nt, Artificial Sequence
  Synthetic
gcaaagaugacauaaagca

SEQ ID NO: 554 - RNA, 19 nt, Artificial Sequence
  Synthetic
gaaccuauuuugcuagaga

SEQ ID NO: 555 - RNA, 19 nt, Artificial Sequence
  Synthetic
gccucagauuaaugaacaa

SEQ ID NO: 556 - RNA, 19 nt, Artificial Sequence
  Synthetic
aagauagacuuugcagaaa

SEQ ID NO: 557 - RNA, 19 nt, Artificial Sequence
  Synthetic
caaggaagcuuuauucuuu

SEQ ID NO: 558 - RNA, 19 nt, Artificial Sequence
  Synthetic
gacauggacacgucagaua

SEQ ID NO: 559 - RNA, 19 nt, Artificial Sequence
  Synthetic
ccugaguacuugauagacu

SEQ ID NO: 560 - RNA, 19 nt, Artificial Sequence
  Synthetic
cuuccaaagacgggagcua

SEQ ID NO: 561 - RNA, 19 nt, Artificial Sequence
  Synthetic
ggaguucuuuugcaggaaa

SEQ ID NO: 562 - RNA, 19 nt, Artificial Sequence
  Synthetic
uugcuaaucucuuugggaa

SEQ ID NO: 563 - RNA, 19 nt, Artificial Sequence
  Synthetic
cagacuggcuggagaaauu

SEQ ID NO: 564 - RNA, 19 nt, Artificial Sequence
  Synthetic
gggaaaacauaguggauga

SEQ ID NO: 565 - RNA, 19 nt, Artificial Sequence
  Synthetic
ugagauuccuugugugaaa

SEQ ID NO: 566 - RNA, 19 nt, Artificial Sequence
  Synthetic
gaacaauuagcaacagaaa

SEQ ID NO: 567 - RNA, 19 nt, Artificial Sequence
  Synthetic
acaauuagcaacagaaaga

SEQ ID NO: 568 - RNA, 19 nt, Artificial Sequence
  Synthetic
gaggaaaagcucaagguua

SEQ ID NO: 569 - RNA, 19 nt, Artificial Sequence
  Synthetic
gccgauaaacauugauuaa

SEQ ID NO: 570 - RNA, 19 nt, Artificial Sequence
  Synthetic
ccaccauggucuaugagaa

SEQ ID NO: 571 - RNA, 19 nt, Artificial Sequence
  Synthetic
aaacauucuccuagcauua

SEQ ID NO: 572 - RNA, 19 nt, Artificial Sequence
  Synthetic
caacaauaccuauguguca

SEQ ID NO: 573 - RNA, 19 nt, Artificial Sequence
  Synthetic
ccaccuggacagaggcuua

SEQ ID NO: 574 - RNA, 19 nt, Artificial Sequence
  Synthetic
aggauuuaccggaggaaaa

SEQ ID NO: 575 - RNA, 19 nt, Artificial Sequence
  Synthetic
ugguggaacugguagagaa

SEQ ID NO: 576 - RNA, 19 nt, Artificial Sequence
  Synthetic
ucacuggauuauugguuaa

SEQ ID NO: 577 - RNA, 19 nt, Artificial Sequence
  Synthetic
gggagaucuucaaguucaa

SEQ ID NO: 578 - RNA, 19 nt, Artificial Sequence
  Synthetic
ggaggaaaaucgaggaacu

SEQ ID NO: 579 - RNA, 19 nt, Artificial Sequence
  Synthetic
gggaacaauuagcaacaga

SEQ ID NO: 580 - RNA, 19 nt, Artificial Sequence
  Synthetic
ccaauagcacucucagaua

SEQ ID NO: 581 - RNA, 19 nt, Artificial Sequence
  Synthetic
ucuggauacuucaaggaua

SEQ ID NO: 582 - RNA, 19 nt, Artificial Sequence
  Synthetic
ccguuuaccugcucuauaa

SEQ ID NO: 583 - RNA, 19 nt, Artificial Sequence
  Synthetic
ucuacagggccuugggcua

SEQ ID NO: 584 - RNA, 19 nt, Artificial Sequence
  Synthetic
uggaacugguagagaagga

SEQ ID NO: 585 - RNA, 19 nt, Artificial Sequence
  Synthetic
ggacaaaugcuuucuaacu

SEQ ID NO: 586 - RNA, 19 nt, Artificial Sequence
  Synthetic
ggacagaggcuuacaagac

SEQ ID NO: 587 - RNA, 19 nt, Artificial Sequence
  Synthetic
ggccauaccccuuaaauaa

SEQ ID NO: 588 - RNA, 19 nt, Artificial Sequence
  Synthetic
ccucaggaccuucaagauu

SEQ ID NO: 589 - RNA, 19 nt, Artificial Sequence
  Synthetic
cugcagggauuuacuggaa

SEQ ID NO: 590 - RNA, 19 nt, Artificial Sequence
  Synthetic
ggaacaauuagcaacagaa

SEQ ID NO: 591 - RNA, 19 nt, Artificial Sequence
  Synthetic
gguucuaacuucagcauuc

SEQ ID NO: 592 - RNA, 19 nt, Artificial Sequence
  Synthetic
caauagcacucucagauau

SEQ ID NO: 593 - RNA, 19 nt, Artificial Sequence
  Synthetic
ggaaagacgacaacgauaa

SEQ ID NO: 594 - RNA, 19 nt, Artificial Sequence
  Synthetic
gggaaagacgacaacgaua

SEQ ID NO: 595 - RNA, 19 nt, Artificial Sequence
  Synthetic
aggacaaggagaaggagaa

SEQ ID NO: 596 - RNA, 19 nt, Artificial Sequence
  Synthetic
gcaaggagaagaaggccaa

SEQ ID NO: 597 - RNA, 19 nt, Artificial Sequence
  Synthetic
ggaccugguguuacggaaa

SEQ ID NO: 598 - RNA, 19 nt, Artificial Sequence
  Synthetic
aggcaacaaugguggcuuu

SEQ ID NO: 599 - RNA, 19 nt, Artificial Sequence
  Synthetic
gcguguacagcgaggauuu

SEQ ID NO: 600 - RNA, 19 nt, Artificial Sequence
  Synthetic
agaaggagaagcagcgcaa

SEQ ID NO: 601 - RNA, 19 nt, Artificial Sequence
  Synthetic
ccacgcagcuggugcucaa

SEQ ID NO: 602 - RNA, 19 nt, Artificial Sequence
  Synthetic
ccaagcagccagagcgaga

SEQ ID NO: 603 - RNA, 19 nt, Artificial Sequence
  Synthetic
gaacagagagaccagcaaa

SEQ ID NO: 604 - RNA, 19 nt, Artificial Sequence
  Synthetic
agaccagcaaagagaacaa

SEQ ID NO: 605 - RNA, 19 nt, Artificial Sequence
  Synthetic
ccacguacccgcagcagaa

SEQ ID NO: 606 - RNA, 19 nt, Artificial Sequence
  Synthetic
acggcaaggacaaggagaa

SEQ ID NO: 607 - RNA, 19 nt, Artificial Sequence
  Synthetic
gagaccugcuggaaggcaa

SEQ ID NO: 608 - RNA, 19 nt, Artificial Sequence
  Synthetic
guuaagagacucaggugga

SEQ ID NO: 609 - RNA, 19 nt, Artificial Sequence
  Synthetic
acgaggagaugaucggcua

SEQ ID NO: 610 - RNA, 19 nt, Artificial Sequence
  Synthetic
ggcaagaacggcaaggaca

SEQ ID NO: 611 - RNA, 19 nt, Artificial Sequence
  Synthetic
ugacggauucugagcacaa

SEQ ID NO: 612 - RNA, 19 nt, Artificial Sequence
  Synthetic
cgcuagaagccaagcugaa

SEQ ID NO: 613 - RNA, 19 nt, Artificial Sequence
  Synthetic
gguucuggccuaugaucaa

SEQ ID NO: 614 - RNA, 19 nt, Artificial Sequence
  Synthetic
gagaagcagcgcaaggaga

SEQ ID NO: 615 - RNA, 19 nt, Artificial Sequence
  Synthetic
gaauaaaucaggagacaaa

SEQ ID NO: 616 - RNA, 19 nt, Artificial Sequence
  Synthetic
ccacaaaacucaacaauaa

SEQ ID NO: 617 - RNA, 19 nt, Artificial Sequence
  Synthetic
gggaaagaguuuaugaauu

SEQ ID NO: 618 - RNA, 19 nt, Artificial Sequence
  Synthetic
aggaaagguaugagagaau

SEQ ID NO: 619 - RNA, 19 nt, Artificial Sequence
  Synthetic
caacagaggcagagagguu

SEQ ID NO: 620 - RNA, 19 nt, Artificial Sequence
  Synthetic
ggaacuaacuguugauaca

SEQ ID NO: 621 - RNA, 19 nt, Artificial Sequence
  Synthetic
gagagaacccagaaauaaa

SEQ ID NO: 622 - RNA, 19 nt, Artificial Sequence
  Synthetic
gaauaaagucuguagucua

SEQ ID NO: 623 - RNA, 19 nt, Artificial Sequence
  Synthetic
aggaagagcuuaugcaaga

SEQ ID NO: 624 - RNA, 19 nt, Artificial Sequence
  Synthetic
gcacagagaaggaggaagu

SEQ ID NO: 625 - RNA, 19 nt, Artificial Sequence
  Synthetic
gcaauucaauggaggaaga

SEQ ID NO: 626 - RNA, 19 nt, Artificial Sequence
  Synthetic
gaggaaggaccgaguagaa

SEQ ID NO: 627 - RNA, 19 nt, Artificial Sequence
  Synthetic
ggaccuacauacacacaaa

SEQ ID NO: 628 - RNA, 19 nt, Artificial Sequence
  Synthetic
cgucagaauuguucacauu

SEQ ID NO: 629 - RNA, 19 nt, Artificial Sequence
  Synthetic
aagauaagcuacagauuga

SEQ ID NO: 630 - RNA, 19 nt, Artificial Sequence
  Synthetic
agaaggaagaggaaaggua

SEQ ID NO: 631 - RNA, 19 nt, Artificial Sequence
  Synthetic
gaagauaagaacacaaaga

SEQ ID NO: 632 - RNA, 19 nt, Artificial Sequence
  Synthetic
gcauauacuggaacugaaa

SEQ ID NO: 633 - RNA, 19 nt, Artificial Sequence
  Synthetic
cagagaaggaggaaguaau

SEQ ID NO: 634 - RNA, 19 nt, Artificial Sequence
  Synthetic
aggacagacuggagcaaaa

SEQ ID NO: 635 - RNA, 19 nt, Artificial Sequence
  Synthetic
gcagaggaacagacacaua

SEQ ID NO: 636 - RNA, 19 nt, Artificial Sequence
  Synthetic
gaauagccuuucugacaaa

SEQ ID NO: 637 - RNA, 19 nt, Artificial Sequence
  Synthetic
gaacagacacauacgucaa

SEQ ID NO: 638 - RNA, 19 nt, Artificial Sequence
  Synthetic
gaggaaagguaugagagaa

SEQ ID NO: 639 - RNA, 19 nt, Artificial Sequence
  Synthetic
agguaugagagaaucgaaa

SEQ ID NO: 640 - RNA, 19 nt, Artificial Sequence
  Synthetic
gacauucauuccagagaaa

SEQ ID NO: 641 - RNA, 19 nt, Artificial Sequence
  Synthetic
ggaaggaccgaguagaaau

SEQ ID NO: 642 - RNA, 19 nt, Artificial Sequence
  Synthetic
guacagccacucugggaaa

SEQ ID NO: 643 - RNA, 19 nt, Artificial Sequence
  Synthetic
gggccagaaggaagaggaa

SEQ ID NO: 644 - RNA, 19 nt, Artificial Sequence
  Synthetic
uagaauaaaucaggagaca

SEQ ID NO: 645 - RNA, 19 nt, Artificial Sequence
  Synthetic
caaagaugauagugacaau

SEQ ID NO: 646 - RNA, 19 nt, Artificial Sequence
  Synthetic
gcacugagacacuggagaa

SEQ ID NO: 647 - RNA, 19 nt, Artificial Sequence
  Synthetic
uggcagaacagaagcagaa

SEQ ID NO: 648 - RNA, 19 nt, Artificial Sequence
  Synthetic
cagcugagucuguugguaa

SEQ ID NO: 649 - RNA, 19 nt, Artificial Sequence
  Synthetic
cugagacacuggagaagaa

SEQ ID NO: 650 - RNA, 19 nt, Artificial Sequence
  Synthetic
gggcaaggaggcuaaacaa

SEQ ID NO: 651 - RNA, 19 nt, Artificial Sequence
  Synthetic
gcagagaggaagaucauga

SEQ ID NO: 652 - RNA, 19 nt, Artificial Sequence
  Synthetic
ggaaagaauugggauguga

SEQ ID NO: 653 - RNA, 19 nt, Artificial Sequence
  Synthetic
agaagggaguugagaagga

SEQ ID NO: 654 - RNA, 19 nt, Artificial Sequence
  Synthetic
caaaggagguucucaguca

SEQ ID NO: 655 - RNA, 19 nt, Artificial Sequence
  Synthetic
ccgauuggccaguguaauu

SEQ ID NO: 656 - RNA, 19 nt, Artificial Sequence
  Synthetic
cauuauaguuggugaagaa

SEQ ID NO: 657 - RNA, 19 nt, Artificial Sequence
  Synthetic
cagaagaauuucagaagua

SEQ ID NO: 658 - RNA, 19 nt, Artificial Sequence
  Synthetic
acagaaacauagagaggaa

SEQ ID NO: 659 - RNA, 19 nt, Artificial Sequence
  Synthetic
gagaggaacuggagcaauu

SEQ ID NO: 660 - RNA, 19 nt, Artificial Sequence
  Synthetic
acauauggaaagugagaaa

SEQ ID NO: 661 - RNA, 19 nt, Artificial Sequence
  Synthetic
gcacaaaagagacgggaaa

SEQ ID NO: 662 - RNA, 19 nt, Artificial Sequence
  Synthetic
acaaacaccaauagagaua

SEQ ID NO: 663 - RNA, 19 nt, Artificial Sequence
  Synthetic
guauaaagccauugaagau

SEQ ID NO: 664 - RNA, 19 nt, Artificial Sequence
  Synthetic
gcaaagagaagaaggaguu

SEQ ID NO: 665 - RNA, 19 nt, Artificial Sequence
  Synthetic
ggaaaaggagcgagaagaa

SEQ ID NO: 666 - RNA, 19 nt, Artificial Sequence
  Synthetic
cgaagagcuugaugaggaa

SEQ ID NO: 667 - RNA, 19 nt, Artificial Sequence
  Synthetic
gcagcuagacaguuagaaa

SEQ ID NO: 668 - RNA, 19 nt, Artificial Sequence
  Synthetic
gaagaucaacugaaagaaa

SEQ ID NO: 669 - RNA, 19 nt, Artificial Sequence
  Synthetic
ccgaagagcuugaugagga

SEQ ID NO: 670 - RNA, 19 nt, Artificial Sequence
  Synthetic
aagaaauggaacagaaaca

SEQ ID NO: 671 - RNA, 19 nt, Artificial Sequence
  Synthetic
aaagaaagcugcauuggaa

SEQ ID NO: 672 - RNA, 19 nt, Artificial Sequence
  Synthetic
cagaaguacugugaagaua

SEQ ID NO: 673 - RNA, 19 nt, Artificial Sequence
  Synthetic
gaaauggaacagaaacaua

SEQ ID NO: 674 - RNA, 19 nt, Artificial Sequence
  Synthetic
ggagcgagaagaacggaua

SEQ ID NO: 675 - RNA, 19 nt, Artificial Sequence
  Synthetic
gagacaugcauauggcuua

SEQ ID NO: 676 - RNA, 19 nt, Artificial Sequence
  Synthetic
agacauauggaaagugaga

SEQ ID NO: 677 - RNA, 19 nt, Artificial Sequence
  Synthetic
gcucaaauauuggcagcua

SEQ ID NO: 678 - RNA, 19 nt, Artificial Sequence
  Synthetic
gguauugaccgaagagcuu

SEQ ID NO: 679 - RNA, 19 nt, Artificial Sequence
  Synthetic
agaaggaguugcaagccaa

SEQ ID NO: 680 - RNA, 19 nt, Artificial Sequence
  Synthetic
acuuggugcuugagaauca

SEQ ID NO: 681 - RNA, 19 nt, Artificial Sequence
  Synthetic
caauugaagcugacuacua

SEQ ID NO: 682 - RNA, 19 nt, Artificial Sequence
  Synthetic
ccagacauauggaaaguga

SEQ ID NO: 683 - RNA, 19 nt, Artificial Sequence
  Synthetic
gcugagaaggcaucgcaaa

SEQ ID NO: 684 - RNA, 19 nt, Artificial Sequence
  Synthetic
ugacuacuaaggagaauaa

SEQ ID NO: 685 - RNA, 19 nt, Artificial Sequence
  Synthetic
cuaaggagaauaagauaga

SEQ ID NO: 686 - RNA, 19 nt, Artificial Sequence
  Synthetic
ggacauacccaaagggcua

SEQ ID NO: 687 - RNA, 19 nt, Artificial Sequence
  Synthetic
cuacaaaccuccugaugaa

SEQ ID NO: 688 - RNA, 19 nt, Artificial Sequence
  Synthetic
uggaauaaauacuggguga

SEQ ID NO: 689 - RNA, 19 nt, Artificial Sequence
  Synthetic
ugaaagacaguaugagaaa

SEQ ID NO: 690 - RNA, 19 nt, Artificial Sequence
  Synthetic
ggacuaaggaucaccauua

SEQ ID NO: 691 - RNA, 19 nt, Artificial Sequence
  Synthetic
acaaauacgacaagaaaca

SEQ ID NO: 692 - RNA, 19 nt, Artificial Sequence
  Synthetic
ggugaaaccaugaucauua

SEQ ID NO: 693 - RNA, 19 nt, Artificial Sequence
  Synthetic
ccgaaaaucagaagacaaa

SEQ ID NO: 694 - RNA, 19 nt, Artificial Sequence
  Synthetic
ggauugaugucucagguua

SEQ ID NO: 695 - RNA, 19 nt, Artificial Sequence
  Synthetic
aacaauauccgcagggaaa

SEQ ID NO: 696 - RNA, 19 nt, Artificial Sequence
  Synthetic
cuacaaauacgacaagaaa

SEQ ID NO: 697 - RNA, 19 nt, Artificial Sequence
  Synthetic
gugaauacguugaguucuu

SEQ ID NO: 698 - RNA, 19 nt, Artificial Sequence
  Synthetic
uaggaaagguggaugguga

SEQ ID NO: 699 - RNA, 19 nt, Artificial Sequence
  Synthetic
gaacaauauccgcagggaa

SEQ ID NO: 700 - RNA, 19 nt, Artificial Sequence
  Synthetic
auacauggcugcauacaua

SEQ ID NO: 701 - RNA, 19 nt, Artificial Sequence
  Synthetic
acaagaaacagcagcaaga

SEQ ID NO: 702 - RNA, 19 nt, Artificial Sequence
  Synthetic
cugaaagacaguaugagaa

SEQ ID NO: 703 - RNA, 19 nt, Artificial Sequence
  Synthetic
gagaaguacuuuaccugaa

SEQ ID NO: 704 - RNA, 19 nt, Artificial Sequence
  Synthetic
aagaaacagcagcaagaaa

SEQ ID NO: 705 - RNA, 19 nt, Artificial Sequence
  Synthetic
agaaacagcagcaagaaau

SEQ ID NO: 706 - RNA, 19 nt, Artificial Sequence
  Synthetic
cuugagcuguuguggaaua

SEQ ID NO: 707 - RNA, 19 nt, Artificial Sequence
  Synthetic
ggaguuucauguuggguuu

SEQ ID NO: 708 - RNA, 19 nt, Artificial Sequence
  Synthetic
cggcgaagcccuggacuaa

SEQ ID NO: 709 - RNA, 19 nt, Artificial Sequence
  Synthetic
ccuuagaagucucauauuu

SEQ ID NO: 710 - RNA, 19 nt, Artificial Sequence
  Synthetic
uagaaacgcaugaccgaaa

SEQ ID NO: 711 - RNA, 19 nt, Artificial Sequence
  Synthetic
ccugaaagacaguaugaga

SEQ ID NO: 712 - RNA, 19 nt, Artificial Sequence
  Synthetic
gaauaaauacugggugaau

SEQ ID NO: 713 - RNA, 19 nt, Artificial Sequence
  Synthetic
augaauacauggcugcaua

SEQ ID NO: 714 - RNA, 19 nt, Artificial Sequence
  Synthetic
ggaauaaauacugggugaa

SEQ ID NO: 715 - RNA, 19 nt, Artificial Sequence
  Synthetic
ggugauugauccaacaaga

SEQ ID NO: 716 - RNA, 19 nt, Artificial Sequence
  Synthetic
ugaaagaauuggagugaua

SEQ ID NO: 717 - RNA, 19 nt, Artificial Sequence
  Synthetic
ggaagaaggucguggucaa

SEQ ID NO: 718 - RNA, 19 nt, Artificial Sequence
  Synthetic
ggguagaaccuuugcuaaa

SEQ ID NO: 719 - RNA, 19 nt, Artificial Sequence
  Synthetic
cuucaagaaugcagcguua

SEQ ID NO: 720 - RNA, 19 nt, Artificial Sequence
  Synthetic
ccgaagaggcugaaucaua

SEQ ID NO: 721 - RNA, 19 nt, Artificial Sequence
  Synthetic
cauaauaaaccaaaggcua

SEQ ID NO: 722 - RNA, 19 nt, Artificial Sequence
  Synthetic
gcucauuggcugaaguuaa

SEQ ID NO: 723 - RNA, 19 nt, Artificial Sequence
  Synthetic
aaaggauguuguagagaua

SEQ ID NO: 724 - RNA, 19 nt, Artificial Sequence
  Synthetic
auguaugaguguagagaau

SEQ ID NO: 725 - RNA, 19 nt, Artificial Sequence
  Synthetic
ccggauauguggagggcuu

SEQ ID NO: 726 - RNA, 19 nt, Artificial Sequence
  Synthetic
cuguaauggaagagcuaaa

SEQ ID NO: 727 - RNA, 19 nt, Artificial Sequence
  Synthetic
gugaaguaguagaagaaaa

SEQ ID NO: 728 - RNA, 19 nt, Artificial Sequence
  Synthetic
cgaagaggcugaaucauaa

SEQ ID NO: 729 - RNA, 19 nt, Artificial Sequence
  Synthetic
uggcugaaguuaaggagaa

SEQ ID NO: 730 - RNA, 19 nt, Artificial Sequence
  Synthetic
aaguaaaggccuccaaaua

SEQ ID NO: 731 - RNA, 19 nt, Artificial Sequence
  Synthetic
aggauguuguagagauaaa

SEQ ID NO: 732 - RNA, 19 nt, Artificial Sequence
  Synthetic
ugggagagauggauauuua

SEQ ID NO: 733 - RNA, 19 nt, Artificial Sequence
  Synthetic
cagaaacagacuaaguaaa

SEQ ID NO: 734 - RNA, 19 nt, Artificial Sequence
  Synthetic
gaaaagaaagcuuaggaua

SEQ ID NO: 735 - RNA, 19 nt, Artificial Sequence
  Synthetic
gaguugaauugcuggaaga

SEQ ID NO: 736 - RNA, 19 nt, Artificial Sequence
  Synthetic
ggauuuaccucugaagaaa

SEQ ID NO: 737 - RNA, 19 nt, Artificial Sequence
  Synthetic
gggaaguauaggacaguau

SEQ ID NO: 738 - RNA, 19 nt, Artificial Sequence
  Synthetic
cacaaugaguucaggcuua

SEQ ID NO: 739 - RNA, 19 nt, Artificial Sequence
  Synthetic
agagauaucuacagacuuu

SEQ ID NO: 740 - RNA, 19 nt, Artificial Sequence
  Synthetic
uagugaaacccaagagcua

SEQ ID NO: 741 - RNA, 19 nt, Artificial Sequence
  Synthetic
aagaaggcuuggagauaau

SEQ ID NO: 742 - RNA, 19 nt, Artificial Sequence
  Synthetic
cagaguuacuuuuggcaau

SEQ ID NO: 743 - RNA, 19 nt, Artificial Sequence
  Synthetic
aagugaaguaguagaagaa

SEQ ID NO: 744 - RNA, 19 nt, Artificial Sequence
  Synthetic
agaaaauacuccaccaaaa

SEQ ID NO: 745 - RNA, 19 nt, Artificial Sequence
  Synthetic
agauaaugauugggaagaa

SEQ ID NO: 746 - RNA, 19 nt, Artificial Sequence
  Synthetic
gaaggauacuaauggguaa

SEQ ID NO: 747 - RNA, 19 nt, Artificial Sequence
  Synthetic
ccaacgaguuacugagaau

SEQ ID NO: 748 - RNA, 19 nt, Artificial Sequence
  Synthetic
gggacugaccucugaguua

SEQ ID NO: 749 - RNA, 19 nt, Artificial Sequence
  Synthetic
ucacagaagcccagaaaca

SEQ ID NO: 750 - RNA, 19 nt, Artificial Sequence
  Synthetic
aaacgaaggccaauaguaa

SEQ ID NO: 751 - RNA, 19 nt, Artificial Sequence
  Synthetic
guagaaagauggaacuuau

SEQ ID NO: 752 - RNA, 19 nt, Artificial Sequence
  Synthetic
ugaaagagguugauuugua

SEQ ID NO: 753 - RNA, 19 nt, Artificial Sequence
  Synthetic
gaaagagguugauuuguaa

SEQ ID NO: 754 - RNA, 19 nt, Artificial Sequence
  Synthetic
ggaauuucuuugugaacuu

SEQ ID NO: 755 - RNA, 19 nt, Artificial Sequence
  Synthetic
ccagaaacaacuuaugaua

SEQ ID NO: 756 - RNA, 19 nt, Artificial Sequence
  Synthetic
gcauuugcccugauggaaa

SEQ ID NO: 757 - RNA, 19 nt, Artificial Sequence
  Synthetic
aauaguaacuccuggugua

SEQ ID NO: 758 - RNA, 19 nt, Artificial Sequence
  Synthetic
guaauaaccgagagaagau

SEQ ID NO: 759 - RNA, 19 nt, Artificial Sequence
  Synthetic
caacacauuccaugggaua

SEQ ID NO: 760 - RNA, 19 nt, Artificial Sequence
  Synthetic
uguuuuagcucuugccaaa

SEQ ID NO: 761 - RNA, 19 nt, Artificial Sequence
  Synthetic
ugcaugagguugugcgaaa

SEQ ID NO: 762 - RNA, 19 nt, Artificial Sequence
  Synthetic
uggacuaucugaugaagaa

SEQ ID NO: 763 - RNA, 19 nt, Artificial Sequence
  Synthetic
ccaccuacauuaacaggaa

SEQ ID NO: 764 - RNA, 19 nt, Artificial Sequence
  Synthetic
cggaauauccacuauaauu

SEQ ID NO: 765 - RNA, 19 nt, Artificial Sequence
  Synthetic
ugaugaagaaugccauaaa

SEQ ID NO: 766 - RNA, 19 nt, Artificial Sequence
  Synthetic
caacagugaggacgaguau

SEQ ID NO: 767 - RNA, 19 nt, Artificial Sequence
  Synthetic
cagcacgcaucgaggcuau

SEQ ID NO: 768 - RNA, 19 nt, Artificial Sequence
  Synthetic
gagcagucucugaugaaga

SEQ ID NO: 769 - RNA, 19 nt, Artificial Sequence
  Synthetic
gcuacaacagugaggacga

SEQ ID NO: 770 - RNA, 19 nt, Artificial Sequence
  Synthetic
acagugaggacgaguauga

SEQ ID NO: 771 - RNA, 19 nt, Artificial Sequence
  Synthetic
caacaggaauaccuagaca

SEQ ID NO: 772 - RNA, 19 nt, Artificial Sequence
  Synthetic
cagcaagcggcgacgucaa

SEQ ID NO: 773 - RNA, 19 nt, Artificial Sequence
  Synthetic
caggagcauugguuugaaa

SEQ ID NO: 774 - RNA, 19 nt, Artificial Sequence
  Synthetic
aaaacaaagugcacagaga

SEQ ID NO: 775 - RNA, 19 nt, Artificial Sequence
  Synthetic
cuguggagguguaccagua

SEQ ID NO: 776 - RNA, 19 nt, Artificial Sequence
  Synthetic
gcauggacuaucugaugaa

SEQ ID NO: 777 - RNA, 19 nt, Artificial Sequence
  Synthetic
cugcagugguugcgggauc

SEQ ID NO: 778 - RNA, 19 nt, Artificial Sequence
  Synthetic
gaugcuagaagacaagaaa

SEQ ID NO: 779 - RNA, 19 nt, Artificial Sequence
  Synthetic
acauuaacaggaagcggaa

SEQ ID NO: 780 - RNA, 19 nt, Artificial Sequence
  Synthetic
cuagacaguaugaagaaaa

SEQ ID NO: 781 - RNA, 19 nt, Artificial Sequence
  Synthetic
ccgacuacuucuccaacua

SEQ ID NO: 782 - RNA, 19 nt, Artificial Sequence
  Synthetic
ccuagacaguaugaagaaa

SEQ ID NO: 783 - RNA, 19 nt, Artificial Sequence
  Synthetic
auuaacaggaagcggaaaa

SEQ ID NO: 784 - RNA, 19 nt, Artificial Sequence
  Synthetic
guuagcuaccaucggaaua

SEQ ID NO: 785 - RNA, 19 nt, Artificial Sequence
  Synthetic
cugaccagguguauggaga

SEQ ID NO: 786 - RNA, 19 nt, Artificial Sequence
  Synthetic
agucauggauugaacagca

SEQ ID NO: 787 - RNA, 19 nt, Artificial Sequence
  Synthetic
ugaugaagaaugccgacua

SEQ ID NO: 788 - RNA, 19 nt, Artificial Sequence
  Synthetic
gcaaccacauugagaugca

SEQ ID NO: 789 - RNA, 19 nt, Artificial Sequence
  Synthetic
ccuccaacucugucucuaa

SEQ ID NO: 790 - RNA, 19 nt, Artificial Sequence
  Synthetic
ggcacugggaccuggauuu

SEQ ID NO: 791 - RNA, 19 nt, Artificial Sequence
  Synthetic
acaaggaggugacgacacu

SEQ ID NO: 792 - RNA, 19 nt, Artificial Sequence
  Synthetic
ggagaacuacgaggaguau

SEQ ID NO: 793 - RNA, 19 nt, Artificial Sequence
  Synthetic
ucaagugccugcugaucca

SEQ ID NO: 794 - RNA, 19 nt, Artificial Sequence
  Synthetic
gacacguacugcugaccau

SEQ ID NO: 795 - RNA, 19 nt, Artificial Sequence
  Synthetic
ccgcagccaugaacuccaa

SEQ ID NO: 796 - RNA, 19 nt, Artificial Sequence
  Synthetic
gcuacuuccugaccaagau

SEQ ID NO: 797 - RNA, 19 nt, Artificial Sequence
  Synthetic
ggaggucuguuccgcauga

SEQ ID NO: 798 - RNA, 19 nt, Artificial Sequence
  Synthetic
acugggaccuggauuuguu

SEQ ID NO: 799 - RNA, 19 nt, Artificial Sequence
  Synthetic
ucaaggucuuucccaacga

SEQ ID NO: 800 - RNA, 19 nt, Artificial Sequence
  Synthetic
gcacugggaccuggauuug

SEQ ID NO: 801 - RNA, 19 nt, Artificial Sequence
  Synthetic
guacugcugaccaucaagu

SEQ ID NO: 802 - RNA, 19 nt, Artificial Sequence
  Synthetic
ggaaagaacuguacaggaa

SEQ ID NO: 803 - RNA, 19 nt, Artificial Sequence
  Synthetic
gugcugaucucgaguguua

SEQ ID NO: 804 - RNA, 19 nt, Artificial Sequence
  Synthetic
ccagaaaccuuuuaagaga

SEQ ID NO: 805 - RNA, 19 nt, Artificial Sequence
  Synthetic
gaauaugaccaaagaccaa

SEQ ID NO: 806 - RNA, 19 nt, Artificial Sequence
  Synthetic
aggaagaggcacauacaaa

SEQ ID NO: 807 - RNA, 19 nt, Artificial Sequence
  Synthetic
ugagauuagaagugugaaa

SEQ ID NO: 808 - RNA, 19 nt, Artificial Sequence
  Synthetic
acaaagaucuucagaaacu

SEQ ID NO: 809 - RNA, 19 nt, Artificial Sequence
  Synthetic
ccggagaaguggaaguuga

SEQ ID NO: 810 - RNA, 19 nt, Artificial Sequence
  Synthetic
gcgugauuuucgagacaau

SEQ ID NO: 811 - RNA, 19 nt, Artificial Sequence
  Synthetic
ccugugugccuuugggaaa

SEQ ID NO: 812 - RNA, 19 nt, Artificial Sequence
  Synthetic
acuccagaauaaugagcaa

SEQ ID NO: 813 - RNA, 19 nt, Artificial Sequence
  Synthetic
gcacauacaaagaaaagaa

SEQ ID NO: 814 - RNA, 19 nt, Artificial Sequence
  Synthetic
ccuugauaguguugauaca

SEQ ID NO: 815 - RNA, 19 nt, Artificial Sequence
  Synthetic
cauuagagaccuuguauca

SEQ ID NO: 816 - RNA, 19 nt, Artificial Sequence
  Synthetic
ccgaaagggcgguuuguga

SEQ ID NO: 817 - RNA, 19 nt, Artificial Sequence
  Synthetic
agacuagcauacaggauga

SEQ ID NO: 818 - RNA, 19 nt, Artificial Sequence
  Synthetic
uagcauacaggaugaacaa

SEQ ID NO: 819 - RNA, 19 nt, Artificial Sequence
  Synthetic
gaaaccugauuguuguaaa

SEQ ID NO: 820 - RNA, 19 nt, Artificial Sequence
  Synthetic
caaagagaaacuaggggaa

SEQ ID NO: 821 - RNA, 19 nt, Artificial Sequence
  Synthetic
gaaccuaccagauguauuu

SEQ ID NO: 822 - RNA, 19 nt, Artificial Sequence
  Synthetic
aaagaacuguacaggaaga

SEQ ID NO: 823 - RNA, 19 nt, Artificial Sequence
  Synthetic
cugagucaauucaagauaa

SEQ ID NO: 824 - RNA, 19 nt, Artificial Sequence
  Synthetic
cuguacaggaagaggcaca

SEQ ID NO: 825 - RNA, 19 nt, Artificial Sequence
  Synthetic
gugaaucgguggaagggca

SEQ ID NO: 826 - RNA, 19 nt, Artificial Sequence
  Synthetic
ccacagauucagagcauuc

SEQ ID NO: 827 - RNA, 19 nt, Artificial Sequence
  Synthetic
gaaugacgacaguauguua

SEQ ID NO: 828 - RNA, 19 nt, Artificial Sequence
  Synthetic
gaugaacaaccaagugauu

SEQ ID NO: 829 - RNA, 19 nt, Artificial Sequence
  Synthetic
agacacagauuggaaagaa

SEQ ID NO: 830 - RNA, 19 nt, Artificial Sequence
  Synthetic
agaggcacauacaaagaaa

SEQ ID NO: 831 - RNA, 19 nt, Artificial Sequence
  Synthetic
ggguguauaagcugcagua

SEQ ID NO: 832 - RNA, 19 nt, Artificial Sequence
  Synthetic
cgaaagaacaggaaggauu

SEQ ID NO: 833 - RNA, 19 nt, Artificial Sequence
  Synthetic
ccaaaugcacugagagaau

SEQ ID NO: 834 - RNA, 19 nt, Artificial Sequence
  Synthetic
uggcaaggguugugcaaau

SEQ ID NO: 835 - RNA, 19 nt, Artificial Sequence
  Synthetic
ggagaauggcugcgagcaa

SEQ ID NO: 836 - RNA, 19 nt, Artificial Sequence
  Synthetic
ggagagaugucuuggauga

SEQ ID NO: 837 - RNA, 19 nt, Artificial Sequence
  Synthetic
ccaaggaggcauugacaua

SEQ ID NO: 838 - RNA, 19 nt, Artificial Sequence
  Synthetic
ugaagagcguggagaguau

SEQ ID NO: 839 - RNA, 19 nt, Artificial Sequence
  Synthetic
gaaaucaguucuugccaaa

SEQ ID NO: 840 - RNA, 19 nt, Artificial Sequence
  Synthetic
cagaugagggagugaacua

SEQ ID NO: 841 - RNA, 19 nt, Artificial Sequence
  Synthetic
gcaaggaaaucgaaagaac

SEQ ID NO: 842 - RNA, 19 nt, Artificial Sequence
  Synthetic
gaacccaccuuuaggauuu

SEQ ID NO: 843 - RNA, 19 nt, Artificial Sequence
  Synthetic
cgccaaaggaaauagcaaa

SEQ ID NO: 844 - RNA, 19 nt, Artificial Sequence
  Synthetic
gaugauucgccaaaggaaa

SEQ ID NO: 845 - RNA, 19 nt, Artificial Sequence
  Synthetic
gcuguuaacgaaugauaaa

SEQ ID NO: 846 - RNA, 19 nt, Artificial Sequence
  Synthetic
aagcagagccacugucuaa

SEQ ID NO: 847 - RNA, 19 nt, Artificial Sequence
  Synthetic
gcauuagauuugccugaaa

SEQ ID NO: 848 - RNA, 19 nt, Artificial Sequence
  Synthetic
gaagaguguugauuuguua

SEQ ID NO: 849 - RNA, 19 nt, Artificial Sequence
  Synthetic
gagaaucuaucuugaugaa

SEQ ID NO: 850 - RNA, 19 nt, Artificial Sequence
  Synthetic
uguggagaguggucagaaa

SEQ ID NO: 851 - RNA, 19 nt, Artificial Sequence
  Synthetic
ggucaaggguuguggagag

SEQ ID NO: 852 - RNA, 19 nt, Artificial Sequence
  Synthetic
ggacaaguaaaguuugaau

SEQ ID NO: 853 - RNA, 19 nt, Artificial Sequence
  Synthetic
aggcaaggaaaucgaaaga

SEQ ID NO: 854 - RNA, 19 nt, Artificial Sequence
  Synthetic
caccaaucaucguaaacaa

SEQ ID NO: 855 - RNA, 19 nt, Artificial Sequence
  Synthetic
caauaagaacccaccuuua

SEQ ID NO: 856 - RNA, 19 nt, Artificial Sequence
  Synthetic
gcccucaugugaagaauaa

SEQ ID NO: 857 - RNA, 19 nt, Artificial Sequence
  Synthetic
gguaaguccuuuaaaccau

SEQ ID NO: 858 - RNA, 19 nt, Artificial Sequence
  Synthetic
ugauuuaaugcgagaacuu

SEQ ID NO: 859 - RNA, 19 nt, Artificial Sequence
  Synthetic
ccaaggacuuagcagauau

SEQ ID NO: 860 - RNA, 19 nt, Artificial Sequence
  Synthetic
caggaaggauucauuaauu

SEQ ID NO: 861 - RNA, 19 nt, Artificial Sequence
  Synthetic
gaacaggaaggauucauua

SEQ ID NO: 862 - RNA, 19 nt, Artificial Sequence
  Synthetic
gggaagaguacaaggacaa

SEQ ID NO: 863 - RNA, 19 nt, Artificial Sequence
  Synthetic
gggcaaggcggaagaggaa

SEQ ID NO: 864 - RNA, 19 nt, Artificial Sequence
  Synthetic
ggaugcagcuagaggauga

SEQ ID NO: 865 - RNA, 19 nt, Artificial Sequence
  Synthetic
gaaagaggcacaaggaaga

SEQ ID NO: 866 - RNA, 19 nt, Artificial Sequence
  Synthetic
cauccagacugaagaccaa

SEQ ID NO: 867 - RNA, 19 nt, Artificial Sequence
  Synthetic
ggcacaaggaagaaaguau

SEQ ID NO: 868 - RNA, 19 nt, Artificial Sequence
  Synthetic
gggaaagaggcacaaggaa

SEQ ID NO: 869 - RNA, 19 nt, Artificial Sequence
  Synthetic
ugacacacuuggacagaga

SEQ ID NO: 870 - RNA, 19 nt, Artificial Sequence
  Synthetic
ggacaaggaggucagguuu

SEQ ID NO: 871 - RNA, 19 nt, Artificial Sequence
  Synthetic
ggaagauuggccuugguaa

SEQ ID NO: 872 - RNA, 19 nt, Artificial Sequence
  Synthetic
ggaugaugcuuuguacaua

SEQ ID NO: 873 - RNA, 19 nt, Artificial Sequence
  Synthetic
gaaggaaggggaagaggaa

SEQ ID NO: 874 - RNA, 19 nt, Artificial Sequence
  Synthetic
acacuuggacagagacuuu

SEQ ID NO: 875 - RNA, 19 nt, Artificial Sequence
  Synthetic
cagugaaggugucucagaa

SEQ ID NO: 876 - RNA, 19 nt, Artificial Sequence
  Synthetic
gaugaugcuuuguacauau

SEQ ID NO: 877 - RNA, 19 nt, Artificial Sequence
  Synthetic
gaagaaaguaugggaagga

SEQ ID NO: 878 - RNA, 19 nt, Artificial Sequence
  Synthetic
ccgcaccaguguccggaaa

SEQ ID NO: 879 - RNA, 19 nt, Artificial Sequence
  Synthetic
aggaggagaugggaagauu

SEQ ID NO: 880 - RNA, 19 nt, Artificial Sequence
  Synthetic
ugaacuguguggauugcaa

SEQ ID NO: 881 - RNA, 19 nt, Artificial Sequence
  Synthetic
gaagauuggccuugguaag

SEQ ID NO: 882 - RNA, 19 nt, Artificial Sequence
  Synthetic
aaguggagaugcagucaga

SEQ ID NO: 883 - RNA, 19 nt, Artificial Sequence
  Synthetic
gaacuguguggauugcaaa

SEQ ID NO: 884 - RNA, 19 nt, Artificial Sequence
  Synthetic
gcacaaggaagaaaguaug

SEQ ID NO: 885 - RNA, 19 nt, Artificial Sequence
  Synthetic
ggaggugaacuguguggau

SEQ ID NO: 886 - RNA, 19 nt, Artificial Sequence
  Synthetic
guacauaucccaggcuaau

SEQ ID NO: 887 - RNA, 19 nt, Artificial Sequence
  Synthetic
cgggaaagaggcacaagga

SEQ ID NO: 888 - RNA, 19 nt, Artificial Sequence
  Synthetic
gaggugaacuguguggauu

SEQ ID NO: 889 - RNA, 19 nt, Artificial Sequence
  Synthetic
ggcgagaggcaucaucaaa

SEQ ID NO: 890 - RNA, 19 nt, Artificial Sequence
  Synthetic
ccagauggugccagcuuga

SEQ ID NO: 891 - RNA, 19 nt, Artificial Sequence
  Synthetic
gauuggccuugguaagauu

SEQ ID NO: 892 - RNA, 19 nt, Artificial Sequence
  Synthetic
agaccaagauccagaaaga

SEQ ID NO: 893 - RNA, 19 nt, Artificial Sequence
  Synthetic
cgggaugaguucugggaca

SEQ ID NO: 894 - RNA, 19 nt, Artificial Sequence
  Synthetic
cugaagaaagagcggcuua

SEQ ID NO: 895 - RNA, 19 nt, Artificial Sequence
  Synthetic
gcaaugagccccugaagaa

SEQ ID NO: 896 - RNA, 19 nt, Artificial Sequence
  Synthetic
gcuacgaugagcugggcaa

SEQ ID NO: 897 - RNA, 19 nt, Artificial Sequence
  Synthetic
gagcaaacgggaugaguuc

SEQ ID NO: 898 - RNA, 19 nt, Artificial Sequence
  Synthetic
ccagaaagauuuugucauc

SEQ ID NO: 899 - RNA, 19 nt, Artificial Sequence
  Synthetic
accaagauccagaaagauu

SEQ ID NO: 900 - RNA, 19 nt, Artificial Sequence
  Synthetic
ccaagauccagaaagauuu

SEQ ID NO: 901 - RNA, 19 nt, Artificial Sequence
  Synthetic
cuugcaaccuugucagaga

SEQ ID NO: 902 - RNA, 19 nt, Artificial Sequence
  Synthetic
cuuaaguggaagagcgacu

SEQ ID NO: 903 - RNA, 19 nt, Artificial Sequence
  Synthetic
ggagcaaacgggaugaguu

SEQ ID NO: 904 - RNA, 19 nt, Artificial Sequence
  Synthetic
cagcacaauuggcagagau

SEQ ID NO: 905 - RNA, 19 nt, Artificial Sequence
  Synthetic
ccgggaagcugcucacaga

SEQ ID NO: 906 - RNA, 19 nt, Artificial Sequence
  Synthetic
caagcgagcaggacgcaau

SEQ ID NO: 907 - RNA, 19 nt, Artificial Sequence
  Synthetic
ugaagaaagagcggcuuaa

SEQ ID NO: 908 - RNA, 19 nt, Artificial Sequence
  Synthetic
acacggaggaggagagccu

SEQ ID NO: 909 - RNA, 19 nt, Artificial Sequence
  Synthetic
aagagcggcuuaaguggaa

SEQ ID NO: 910 - RNA, 19 nt, Artificial Sequence
  Synthetic
gcuaccagcugcccaucua

SEQ ID NO: 911 - RNA, 19 nt, Artificial Sequence
  Synthetic
ucauccaggucaucaucaa

SEQ ID NO: 912 - RNA, 19 nt, Artificial Sequence
  Synthetic
ggagaccaagauccagaaa

SEQ ID NO: 913 - RNA, 19 nt, Artificial Sequence
  Synthetic
aagaaagagcggcuuaagu

SEQ ID NO: 914 - RNA, 19 nt, Artificial Sequence
  Synthetic
gcacaauuggcagagauga

SEQ ID NO: 915 - RNA, 19 nt, Artificial Sequence
  Synthetic
uugcaaccuugucagagaa

SEQ ID NO: 916 - RNA, 19 nt, Artificial Sequence
  Synthetic
gccgugaguucccgcugaa

SEQ ID NO: 917 - RNA, 19 nt, Artificial Sequence
  Synthetic
cauggcacccucugugaau

SEQ ID NO: 918 - RNA, 19 nt, Artificial Sequence
  Synthetic
gcaaacgggaugaguucug

SEQ ID NO: 919 - RNA, 19 nt, Artificial Sequence
  Synthetic
ccacacacgggccuugcaa

SEQ ID NO: 920 - RNA, 19 nt, Artificial Sequence
  Synthetic
agaaagagcggcuuaagug

SEQ ID NO: 921 - RNA, 19 nt, Artificial Sequence
  Synthetic
acacgggccuugcaaccuu

SEQ ID NO: 922 - RNA, 19 nt, Artificial Sequence
  Synthetic
ggugauugauguagggaaa

SEQ ID NO: 923 - RNA, 19 nt, Artificial Sequence
  Synthetic
gggagaauguguuggcaua

SEQ ID NO: 924 - RNA, 19 nt, Artificial Sequence
  Synthetic
agucauaaguucaggauau

SEQ ID NO: 925 - RNA, 19 nt, Artificial Sequence
  Synthetic
gggaaauguuuguacuaua

SEQ ID NO: 926 - RNA, 19 nt, Artificial Sequence
  Synthetic
ggaacugauucauaagaaa

SEQ ID NO: 927 - RNA, 19 nt, Artificial Sequence
  Synthetic
cagaagaauuggguagaua

SEQ ID NO: 928 - RNA, 19 nt, Artificial Sequence
  Synthetic
gcaggaugcucaugaauuu

SEQ ID NO: 929 - RNA, 19 nt, Artificial Sequence
  Synthetic
gggugcaaguauagcuuua

SEQ ID NO: 930 - RNA, 19 nt, Artificial Sequence
  Synthetic
ccaugaaacuuacgcagua

SEQ ID NO: 931 - RNA, 19 nt, Artificial Sequence
  Synthetic
ugaguaaccucgauauuaa

SEQ ID NO: 932 - RNA, 19 nt, Artificial Sequence
  Synthetic
uuggaaggcuguagaagua

SEQ ID NO: 933 - RNA, 19 nt, Artificial Sequence
  Synthetic
cagcauucauggauagauu

SEQ ID NO: 934 - RNA, 19 nt, Artificial Sequence
  Synthetic
gcccaaaggcucugcagua

SEQ ID NO: 935 - RNA, 19 nt, Artificial Sequence
  Synthetic
caagagaguaacugaaaga

SEQ ID NO: 936 - RNA, 19 nt, Artificial Sequence
  Synthetic
gagcagaauacauccauua

SEQ ID NO: 937 - RNA, 19 nt, Artificial Sequence
  Synthetic
gaaacagggugaagagaag

SEQ ID NO: 938 - RNA, 19 nt, Artificial Sequence
  Synthetic
caaacaagaagcccagaaa

SEQ ID NO: 939 - RNA, 19 nt, Artificial Sequence
  Synthetic
guagcaaagaugaagauuu

SEQ ID NO: 940 - RNA, 19 nt, Artificial Sequence
  Synthetic
uggagcagcugcacagaua

SEQ ID NO: 941 - RNA, 19 nt, Artificial Sequence
  Synthetic
ggagugaggucguggguua

SEQ ID NO: 942 - RNA, 19 nt, Artificial Sequence
  Synthetic
ccaucgaagaggagaucua

SEQ ID NO: 943 - RNA, 19 nt, Artificial Sequence
  Synthetic
uggaagaggaggaggagga

SEQ ID NO: 944 - RNA, 19 nt, Artificial Sequence
  Synthetic
ggaagcggguggacagcaa

SEQ ID NO: 945 - RNA, 19 nt, Artificial Sequence
  Synthetic
gggcucagguaauaaagaa

SEQ ID NO: 946 - RNA, 19 nt, Artificial Sequence
  Synthetic
aggaguugcugauggaaga

SEQ ID NO: 947 - RNA, 19 nt, Artificial Sequence
  Synthetic
gggucucagcagaggacaa

SEQ ID NO: 948 - RNA, 19 nt, Artificial Sequence
  Synthetic
ggacaagagucggagacca

SEQ ID NO: 949 - RNA, 19 nt, Artificial Sequence
  Synthetic
agaaacuggacaaguacaa

SEQ ID NO: 950 - RNA, 19 nt, Artificial Sequence
  Synthetic
gcaagaagcuggugaaccc

SEQ ID NO: 951 - RNA, 19 nt, Artificial Sequence
  Synthetic
ugauggaagaggaggagga

SEQ ID NO: 952 - RNA, 19 nt, Artificial Sequence
  Synthetic
cggaugggcucagguaaua

SEQ ID NO: 953 - RNA, 19 nt, Artificial Sequence
  Synthetic
gggccucugucaaguacaa

SEQ ID NO: 954 - RNA, 19 nt, Artificial Sequence
  Synthetic
aguacaaaggccagaaacu

SEQ ID NO: 955 - RNA, 19 nt, Artificial Sequence
  Synthetic
cuuaagaucuccuuggcca

SEQ ID NO: 956 - RNA, 19 nt, Artificial Sequence
  Synthetic
aguccaagaucucgccuuu

SEQ ID NO: 957 - RNA, 19 nt, Artificial Sequence
  Synthetic
ucaacaaguuccagccguu

SEQ ID NO: 958 - RNA, 19 nt, Artificial Sequence
  Synthetic
cagccagacggaaggauca

SEQ ID NO: 959 - RNA, 19 nt, Artificial Sequence
  Synthetic
ccgagaugcugcuggugga

SEQ ID NO: 960 - RNA, 19 nt, Artificial Sequence
  Synthetic
aggaggaguugcugaugga

SEQ ID NO: 961 - RNA, 19 nt, Artificial Sequence
  Synthetic
cugcagggcuccagcaaug

SEQ ID NO: 962 - RNA, 19 nt, Artificial Sequence
  Synthetic
agaugcugcugguggaguu

SEQ ID NO: 963 - RNA, 19 nt, Artificial Sequence
  Synthetic
caaguacaaaggccagaaa

SEQ ID NO: 964 - RNA, 19 nt, Artificial Sequence
  Synthetic
acgcacagauggacuacca

SEQ ID NO: 965 - RNA, 19 nt, Artificial Sequence
  Synthetic
ucgacaagcuuaagaucuc

SEQ ID NO: 966 - RNA, 19 nt, Artificial Sequence
  Synthetic
acaccuaccucgacaagcu

SEQ ID NO: 967 - RNA, 19 nt, Artificial Sequence
  Synthetic
gguggaaguaacauccuuu

SEQ ID NO: 968 - RNA, 19 nt, Artificial Sequence
  Synthetic
ggagccaggagcacaccua

SEQ ID NO: 969 - RNA, 19 nt, Artificial Sequence
  Synthetic
ggaugggcucagguaauaa

SEQ ID NO: 970 - RNA, 19 nt, Artificial Sequence
  Synthetic
gcucagguaauaaagaaac

SEQ ID NO: 971 - RNA, 19 nt, Artificial Sequence
  Synthetic
acgauauccucuacaaaua

SEQ ID NO: 972 - RNA, 19 nt, Artificial Sequence
  Synthetic
gaucaaggaccuccacaaa

SEQ ID NO: 973 - RNA, 19 nt, Artificial Sequence
  Synthetic
gguuguaaaugguccuauu

SEQ ID NO: 974 - RNA, 19 nt, Artificial Sequence
  Synthetic
aggaguaugcugaagauga

SEQ ID NO: 975 - RNA, 19 nt, Artificial Sequence
  Synthetic
caauugaggauuuccacaa

SEQ ID NO: 976 - RNA, 19 nt, Artificial Sequence
  Synthetic
gcaaggagagcgaccacau

SEQ ID NO: 977 - RNA, 19 nt, Artificial Sequence
  Synthetic
ccuaucuacuccugagcuu

SEQ ID NO: 978 - RNA, 19 nt, Artificial Sequence
  Synthetic
uggaggcacugcuggauga

SEQ ID NO: 979 - RNA, 19 nt, Artificial Sequence
  Synthetic
ucuaugggauccuggaagu

SEQ ID NO: 980 - RNA, 19 nt, Artificial Sequence
  Synthetic
acuacgauauccucuacaa

SEQ ID NO: 981 - RNA, 19 nt, Artificial Sequence
  Synthetic
gaccgaauucagcaagaga

SEQ ID NO: 982 - RNA, 19 nt, Artificial Sequence
  Synthetic
caacaucuaucaacagaag

SEQ ID NO: 983 - RNA, 19 nt, Artificial Sequence
  Synthetic
gccaggcgcuagacaugua

SEQ ID NO: 984 - RNA, 19 nt, Artificial Sequence
  Synthetic
agauaaagauggugaacaa

SEQ ID NO: 985 - RNA, 19 nt, Artificial Sequence
  Synthetic
cgagagaagcuuagugaaa

SEQ ID NO: 986 - RNA, 19 nt, Artificial Sequence
  Synthetic
ggauaagacauuaaaggaa

SEQ ID NO: 987 - RNA, 19 nt, Artificial Sequence
  Synthetic
caacaugucagcaggauaa

SEQ ID NO: 988 - RNA, 19 nt, Artificial Sequence
  Synthetic
ggauggagcaccaaauaaa

SEQ ID NO: 989 - RNA, 19 nt, Artificial Sequence
  Synthetic
gagaagugauggugaaagu

SEQ ID NO: 990 - RNA, 19 nt, Artificial Sequence
  Synthetic
ggaaucauguugugcacua

SEQ ID NO: 991 - RNA, 19 nt, Artificial Sequence
  Synthetic
ccauuuaccugcugaaaca

SEQ ID NO: 992 - RNA, 19 nt, Artificial Sequence
  Synthetic
caguagaaauggcuuauaa

SEQ ID NO: 993 - RNA, 19 nt, Artificial Sequence
  Synthetic
gggagaaggacaaggcaua

SEQ ID NO: 994 - RNA, 19 nt, Artificial Sequence
  Synthetic
gaacauacucugaggaaca

SEQ ID NO: 995 - RNA, 19 nt, Artificial Sequence
  Synthetic
gcauacagcuuauugauua

SEQ ID NO: 996 - RNA, 19 nt, Artificial Sequence
  Synthetic
caaaggauauuguaggaua

SEQ ID NO: 997 - RNA, 19 nt, Artificial Sequence
  Synthetic
agacuuaccugaaggaauu

SEQ ID NO: 998 - RNA, 19 nt, Artificial Sequence
  Synthetic
gcucagaggugguggauuc

SEQ ID NO: 999 - RNA, 19 nt, Artificial Sequence
  Synthetic
aagaaaaccucaaaggaua

SEQ ID NO: 1000 - RNA, 19 nt, Artificial Sequence
  Synthetic
gauuagagcuggcaagcau

SEQ ID NO: 1001 - RNA, 19 nt, Artificial Sequence
  Synthetic
ggacaaaucugauccugua

SEQ ID NO: 1002 - RNA, 19 nt, Artificial Sequence
  Synthetic
ggacauggacaauaaagua

SEQ ID NO: 1003 - RNA, 19 nt, Artificial Sequence
  Synthetic
aguauaugauccucagaua

SEQ ID NO: 1004 - RNA, 19 nt, Artificial Sequence
  Synthetic
uguaagcgacuaugagaaa

SEQ ID NO: 1005 - RNA, 19 nt, Artificial Sequence
  Synthetic
ggacaaggcauacagcuua

SEQ ID NO: 1006 - RNA, 19 nt, Artificial Sequence
  Synthetic
ggaacuagccaauaugaau

SEQ ID NO: 1007 - RNA, 19 nt, Artificial Sequence
  Synthetic
gaaauaacauccucucaaa

SEQ ID NO: 1008 - RNA, 19 nt, Artificial Sequence
  Synthetic
augaggacauggacaauaa

SEQ ID NO: 1009 - RNA, 19 nt, Artificial Sequence
  Synthetic
cagaaaggauggagaacau

SEQ ID NO: 1010 - RNA, 19 nt, Artificial Sequence
  Synthetic
caauaaagcaugaaaguga

SEQ ID NO: 1011 - RNA, 19 nt, Artificial Sequence
  Synthetic
ggugaaugguauaaguuua

SEQ ID NO: 1012 - RNA, 19 nt, Artificial Sequence
  Synthetic
caucagacuugaaggaaau

SEQ ID NO: 1013 - RNA, 19 nt, Artificial Sequence
  Synthetic
agacgaaacugcaaaggaa

SEQ ID NO: 1014 - RNA, 19 nt, Artificial Sequence
  Synthetic
guagaagaguggcggaaau

SEQ ID NO: 1015 - RNA, 19 nt, Artificial Sequence
  Synthetic
ccaaaugccuuaugucaaa

SEQ ID NO: 1016 - RNA, 19 nt, Artificial Sequence
  Synthetic
gaaauuacaacuagggauu

SEQ ID NO: 1017 - RNA, 19 nt, Artificial Sequence
  Synthetic
ggaagaaaaugaagccuua

SEQ ID NO: 1018 - RNA, 19 nt, Artificial Sequence
  Synthetic
gcaagauggugaugcagaa

SEQ ID NO: 1019 - RNA, 19 nt, Artificial Sequence
  Synthetic
gauguaaacccuucagaaa

SEQ ID NO: 1020 - RNA, 19 nt, Artificial Sequence
  Synthetic
gaggagugguguauugaaa

SEQ ID NO: 1021 - RNA, 19 nt, Artificial Sequence
  Synthetic
gaacaaagcaacggaaaga

SEQ ID NO: 1022 - RNA, 19 nt, Artificial Sequence
  Synthetic
gcauauugcgucugaagaa

SEQ ID NO: 1023 - RNA, 19 nt, Artificial Sequence
  Synthetic
gcaagaaccagaaagagaa

SEQ ID NO: 1024 - RNA, 19 nt, Artificial Sequence
  Synthetic
agaaggaacuugcagaaau

SEQ ID NO: 1025 - RNA, 19 nt, Artificial Sequence
  Synthetic
ccaaaggagacaacauuua

SEQ ID NO: 1026 - RNA, 19 nt, Artificial Sequence
  Synthetic
cuguagugcuggacccaaa

SEQ ID NO: 1027 - RNA, 19 nt, Artificial Sequence
  Synthetic
acaaagaguugaugacagu

SEQ ID NO: 1028 - RNA, 19 nt, Artificial Sequence
  Synthetic
ccaacagagcagagcauga

SEQ ID NO: 1029 - RNA, 19 nt, Artificial Sequence
  Synthetic
gaauggaggucaacuauau

SEQ ID NO: 1030 - RNA, 19 nt, Artificial Sequence
  Synthetic
cgauggagaucaacgugaa

SEQ ID NO: 1031 - RNA, 19 nt, Artificial Sequence
  Synthetic
ccacacaguacaugaccaa

SEQ ID NO: 1032 - RNA, 19 nt, Artificial Sequence
  Synthetic
gcugcuaaauugucaacua

SEQ ID NO: 1033 - RNA, 19 nt, Artificial Sequence
  Synthetic
gaugacaguccaagcacua

SEQ ID NO: 1034 - RNA, 19 nt, Artificial Sequence
  Synthetic
ggagacaacauuuaugaau

SEQ ID NO: 1035 - RNA, 19 nt, Artificial Sequence
  Synthetic
cuaaaagaauucagaagga

SEQ ID NO: 1036 - RNA, 19 nt, Artificial Sequence
  Synthetic
gaaggaacuugcagaaauc

SEQ ID NO: 1037 - RNA, 19 nt, Artificial Sequence
  Synthetic
cagaaggaacuugcagaaa

SEQ ID NO: 1038 - RNA, 19 nt, Artificial Sequence
  Synthetic
ucagcaagaaccagaaaga

SEQ ID NO: 1039 - RNA, 19 nt, Artificial Sequence
  Synthetic
ccacugaggcacaaagagu

SEQ ID NO: 1040 - RNA, 19 nt, Artificial Sequence
  Synthetic
ucagaaggaacuugcagaa

SEQ ID NO: 1041 - RNA, 19 nt, Artificial Sequence
  Synthetic
caagaaucuaucacuguaa

SEQ ID NO: 1042 - RNA, 19 nt, Artificial Sequence
  Synthetic
gauggagaucaacgugaaa

SEQ ID NO: 1043 - RNA, 19 nt, Artificial Sequence
  Synthetic
uaugaauggaggucaacua

SEQ ID NO: 1044 - RNA, 19 nt, Artificial Sequence
  Synthetic
gcacaaagaguugaugaca

SEQ ID NO: 1045 - RNA, 19 nt, Artificial Sequence
  Synthetic
ucaccagacuauccguuua

SEQ ID NO: 1046 - RNA, 19 nt, Artificial Sequence
  Synthetic
agaucaacgugaaaguguu

SEQ ID NO: 1047 - RNA, 19 nt, Artificial Sequence
  Synthetic
acaagaaucuaucacugua

SEQ ID NO: 1048 - RNA, 19 nt, Artificial Sequence
  Synthetic
caacuggaguccggcuuua

SEQ ID NO: 1049 - RNA, 19 nt, Artificial Sequence
  Synthetic
gagaucaacgugaaagugu

SEQ ID NO: 1050 - RNA, 19 nt, Artificial Sequence
  Synthetic
ugaauggaggucaacuaua

SEQ ID NO: 1051 - RNA, 19 nt, Artificial Sequence
  Synthetic
gcaaaaccgcugcuaaauu

SEQ ID NO: 1052 - RNA, 19 nt, Artificial Sequence
  Synthetic
caacuagugcuaaaagaau

SEQ ID NO: 1053 - RNA, 19 nt, Artificial Sequence
  Synthetic
gaagaugguugcagaggaa

SEQ ID NO: 1054 - RNA, 19 nt, Artificial Sequence
  Synthetic
gcaaggaaacucaaggaaa

SEQ ID NO: 1055 - RNA, 19 nt, Artificial Sequence
  Synthetic
caaggaaacucaaggaaaa

SEQ ID NO: 1056 - RNA, 19 nt, Artificial Sequence
  Synthetic
gugaaaggcagaagcauua

SEQ ID NO: 1057 - RNA, 19 nt, Artificial Sequence
  Synthetic
cgugaaaggcagaagcauu

SEQ ID NO: 1058 - RNA, 19 nt, Artificial Sequence
  Synthetic
acaucaagcuucccagaaa

SEQ ID NO: 1059 - RNA, 19 nt, Artificial Sequence
  Synthetic
caauauagaucuuccuuga

SEQ ID NO: 1060 - RNA, 19 nt, Artificial Sequence
  Synthetic
gagaacaggaggaaugaga

SEQ ID NO: 1061 - RNA, 19 nt, Artificial Sequence
  Synthetic
gcacugggcaugucacaaa

SEQ ID NO: 1062 - RNA, 19 nt, Artificial Sequence
  Synthetic
ggcagaagcauuagcauga

SEQ ID NO: 1063 - RNA, 19 nt, Artificial Sequence
  Synthetic
gggcuuauauccuguucua

SEQ ID NO: 1064 - RNA, 19 nt, Artificial Sequence
  Synthetic
agagggagauaauguguau

SEQ ID NO: 1065 - RNA, 19 nt, Artificial Sequence
  Synthetic
gaaggcugcucgaggaaca

SEQ ID NO: 1066 - RNA, 19 nt, Artificial Sequence
  Synthetic
ggauggugaagcugaguuu

SEQ ID NO: 1067 - RNA, 19 nt, Artificial Sequence
  Synthetic
gcagcaggcuagcagguuu

SEQ ID NO: 1068 - RNA, 19 nt, Artificial Sequence
  Synthetic
gcacugcgggugaggauga

SEQ ID NO: 1069 - RNA, 19 nt, Artificial Sequence
  Synthetic
gcucagucgucaauguaaa

SEQ ID NO: 1070 - RNA, 19 nt, Artificial Sequence
  Synthetic
gggaagaguccacugaaca

SEQ ID NO: 1071 - RNA, 19 nt, Artificial Sequence
  Synthetic
ggaagaguccacugaacau

SEQ ID NO: 1072 - RNA, 19 nt, Artificial Sequence
  Synthetic
aaagaugaauccaugguau

SEQ ID NO: 1073 - RNA, 19 nt, Artificial Sequence
  Synthetic
gguaauagauuuuccagaa

SEQ ID NO: 1074 - RNA, 19 nt, Artificial Sequence
  Synthetic
ggaaguaauuuucgugcua

SEQ ID NO: 1075 - RNA, 19 nt, Artificial Sequence
  Synthetic
caaaaugcaucauggaaaa

SEQ ID NO: 1076 - RNA, 19 nt, Artificial Sequence
  Synthetic
ccagugaagagaagauuaa

SEQ ID NO: 1077 - RNA, 19 nt, Artificial Sequence
  Synthetic
ccaauggauuugaugacaa

SEQ ID NO: 1078 - RNA, 19 nt, Artificial Sequence
  Synthetic
uguuugaacugcaggagua

SEQ ID NO: 1079 - RNA, 19 nt, Artificial Sequence
  Synthetic
aaagagagcugcgggaaua

SEQ ID NO: 1080 - RNA, 19 nt, Artificial Sequence
  Synthetic
uauacaagaugguggucua

SEQ ID NO: 1081 - RNA, 19 nt, Artificial Sequence
  Synthetic
uuagaagaauucagaggaa

SEQ ID NO: 1082 - RNA, 19 nt, Artificial Sequence
  Synthetic
gaguauaucuucugugguu

SEQ ID NO: 1083 - RNA, 19 nt, Artificial Sequence
  Synthetic
gaucagaaguaucauguga

SEQ ID NO: 1084 - RNA, 19 nt, Artificial Sequence
  Synthetic
agacccaccucuacagaaa

SEQ ID NO: 1085 - RNA, 19 nt, Artificial Sequence
  Synthetic
gaugaagcuuccugcacaa

SEQ ID NO: 1086 - RNA, 19 nt, Artificial Sequence
  Synthetic
ucacacaagccuucugaaa

SEQ ID NO: 1087 - RNA, 19 nt, Artificial Sequence
  Synthetic
agaagaaccaguaguuuau

SEQ ID NO: 1088 - RNA, 19 nt, Artificial Sequence
  Synthetic
ggacauaaagaaagggaau

SEQ ID NO: 1089 - RNA, 19 nt, Artificial Sequence
  Synthetic
augcugagguugagauaaa

SEQ ID NO: 1090 - RNA, 19 nt, Artificial Sequence
  Synthetic
agagaaacuuggagcugaa

SEQ ID NO: 1091 - RNA, 19 nt, Artificial Sequence
  Synthetic
cagucgaacucgugaauga

SEQ ID NO: 1092 - RNA, 19 nt, Artificial Sequence
  Synthetic
gagauaaagacgggacaua

SEQ ID NO: 1093 - RNA, 19 nt, Artificial Sequence
  Synthetic
ggauggugaucauugguaa

SEQ ID NO: 1094 - RNA, 19 nt, Artificial Sequence
  Synthetic
ccaaaggaugaaacaaaua

SEQ ID NO: 1095 - RNA, 19 nt, Artificial Sequence
  Synthetic
cuagaaaggguuagcauuu

SEQ ID NO: 1096 - RNA, 19 nt, Artificial Sequence
  Synthetic
uaccaaaggaugaaacaaa

SEQ ID NO: 1097 - RNA, 19 nt, Artificial Sequence
  Synthetic
gcaacaucacggagucaua

SEQ ID NO: 1098 - RNA, 19 nt, Artificial Sequence
  Synthetic
acacagaagacuuagauca

SEQ ID NO: 1099 - RNA, 19 nt, Artificial Sequence
  Synthetic
gcauggaacuucucaccaa

SEQ ID NO: 1100 - RNA, 19 nt, Artificial Sequence
  Synthetic
agauaaagacgggacauaa

SEQ ID NO: 1101 - RNA, 19 nt, Artificial Sequence
  Synthetic
cugaaacgaugguguuaau

SEQ ID NO: 1102 - RNA, 19 nt, Artificial Sequence
  Synthetic
caacaaaucucaauacagu

SEQ ID NO: 1103 - RNA, 19 nt, Artificial Sequence
  Synthetic
agaaaggguuagcauuuua

SEQ ID NO: 1104 - RNA, 19 nt, Artificial Sequence
  Synthetic
gggaaauuauggauucuuu

SEQ ID NO: 1105 - RNA, 19 nt, Artificial Sequence
  Synthetic
ccaaagauggccaagugaa

SEQ ID NO: 1106 - RNA, 19 nt, Artificial Sequence
  Synthetic
ggaaguagcugaugaagau

SEQ ID NO: 1107 - RNA, 19 nt, Artificial Sequence
  Synthetic
ggguaggacaaguggaaau

SEQ ID NO: 1108 - RNA, 19 nt, Artificial Sequence
  Synthetic
ucgagagaacagagagaaa

SEQ ID NO: 1109 - RNA, 19 nt, Artificial Sequence
  Synthetic
gagagaacagagagaaauu

SEQ ID NO: 1110 - RNA, 19 nt, Artificial Sequence
  Synthetic
gaugaagauaacagugaaa

SEQ ID NO: 1111 - RNA, 19 nt, Artificial Sequence
  Synthetic
agagaaauuugaagcguuu

SEQ ID NO: 1112 - RNA, 19 nt, Artificial Sequence
  Synthetic
ggaugacaguugcaaguaa

SEQ ID NO: 1113 - RNA, 19 nt, Artificial Sequence
  Synthetic
augaauugcuguaugagaa

SEQ ID NO: 1114 - RNA, 19 nt, Artificial Sequence
  Synthetic
gagagaaauuugaagcguu

SEQ ID NO: 1115 - RNA, 19 nt, Artificial Sequence
  Synthetic
agaaggaucauuugaagaa

SEQ ID NO: 1116 - RNA, 19 nt, Artificial Sequence
  Synthetic
uaucagauucagaggauga

SEQ ID NO: 1117 - RNA, 19 nt, Artificial Sequence
  Synthetic
ucacauacccaguaaugaa

SEQ ID NO: 1118 - RNA, 19 nt, Artificial Sequence
  Synthetic
ugccauacaaggaaaguua

SEQ ID NO: 1119 - RNA, 19 nt, Artificial Sequence
  Synthetic
uggaaguagcugaugaaga

SEQ ID NO: 1120 - RNA, 19 nt, Artificial Sequence
  Synthetic
acaggaauggguaggacaa

SEQ ID NO: 1121 - RNA, 19 nt, Artificial Sequence
  Synthetic
gguaggacaaguggaaaua

SEQ ID NO: 1122 - RNA, 19 nt, Artificial Sequence
  Synthetic
cuucgagagaacagagaga

SEQ ID NO: 1123 - RNA, 19 nt, Artificial Sequence
  Synthetic
gaacagagagaaauuugaa

SEQ ID NO: 1124 - RNA, 19 nt, Artificial Sequence
  Synthetic
cguuggaaguagcugauga

SEQ ID NO: 1125 - RNA, 19 nt, Artificial Sequence
  Synthetic
gggacuguuugcuuugaaa

SEQ ID NO: 1126 - RNA, 19 nt, Artificial Sequence
  Synthetic
cauacccaguaaugaaaua

SEQ ID NO: 1127 - RNA, 19 nt, Artificial Sequence
  Synthetic
cuuauguacaggaaagauu

SEQ ID NO: 1128 - RNA, 19 nt, Artificial Sequence
  Synthetic
cugaugaagauaacaguga

SEQ ID NO: 1129 - RNA, 19 nt, Artificial Sequence
  Synthetic
ucacuaucuucgagagaac

SEQ ID NO: 1130 - RNA, 19 nt, Artificial Sequence
  Synthetic
aauaucagauucagaggau

SEQ ID NO: 1131 - RNA, 19 nt, Artificial Sequence
  Synthetic
guguaucccauaaaguaua

SEQ ID NO: 1132 - RNA, 19 nt, Artificial Sequence
  Synthetic
ugaugaagauaacagugaa

SEQ ID NO: 1133 - RNA, 19 nt, Artificial Sequence
  Synthetic
cgagagaacagagagaaau

SEQ ID NO: 1134 - RNA, 19 nt, Artificial Sequence
  Synthetic
aaguagcugaugaagauaa

SEQ ID NO: 1135 - RNA, 19 nt, Artificial Sequence
  Synthetic
cuucacaaguaacagaaaa

SEQ ID NO: 1136 - RNA, 19 nt, Artificial Sequence
  Synthetic
cagaagagguagaggcuca

SEQ ID NO: 1137 - RNA, 19 nt, Artificial Sequence
  Synthetic
gcaaauggcacuugaaaga

SEQ ID NO: 1138 - RNA, 19 nt, Artificial Sequence
  Synthetic
ggacaaaagagaagccaaa

SEQ ID NO: 1139 - RNA, 19 nt, Artificial Sequence
  Synthetic
ggaaaggagacaaggccaa

SEQ ID NO: 1140 - RNA, 19 nt, Artificial Sequence
  Synthetic
cggcagaguuuuauaauga

SEQ ID NO: 1141 - RNA, 19 nt, Artificial Sequence
  Synthetic
agaagagcaugcugggaaa

SEQ ID NO: 1142 - RNA, 19 nt, Artificial Sequence
  Synthetic
gcauguugauccugagcaa

SEQ ID NO: 1143 - RNA, 19 nt, Artificial Sequence
  Synthetic
ugaaggacccagagcauaa

SEQ ID NO: 1144 - RNA, 19 nt, Artificial Sequence
  Synthetic
cguuauaucuucucagcaa

SEQ ID NO: 1145 - RNA, 19 nt, Artificial Sequence
  Synthetic
gcaaagacgcuuaaacauu

SEQ ID NO: 1146 - RNA, 19 nt, Artificial Sequence
  Synthetic
agacaggcuucuuggagua

SEQ ID NO: 1147 - RNA, 19 nt, Artificial Sequence
  Synthetic
acaaaucuaccaugagaaa

SEQ ID NO: 1148 - RNA, 19 nt, Artificial Sequence
  Synthetic
aaacaucauuugcgaggaa

SEQ ID NO: 1149 - RNA, 19 nt, Artificial Sequence
  Synthetic
ggauaugcaaagacgcuua

SEQ ID NO: 1150 - RNA, 19 nt, Artificial Sequence
  Synthetic
ccacaaaucuaccaugaga

SEQ ID NO: 1151 - RNA, 19 nt, Artificial Sequence
  Synthetic
auaaaggucucucaggaaa

SEQ ID NO: 1152 - RNA, 19 nt, Artificial Sequence
  Synthetic
cauggacaccagagaauaa

SEQ ID NO: 1153 - RNA, 19 nt, Artificial Sequence
  Synthetic
ucacuaacgucaugggcuu

SEQ ID NO: 1154 - RNA, 19 nt, Artificial Sequence
  Synthetic
cauaaaggucucucaggaa

SEQ ID NO: 1155 - RNA, 19 nt, Artificial Sequence
  Synthetic
ccaagcggcuacugcguua

SEQ ID NO: 1156 - RNA, 19 nt, Artificial Sequence
  Synthetic
aagaagagcaugcugggaa

SEQ ID NO: 1157 - RNA, 19 nt, Artificial Sequence
  Synthetic
ggaaacuccucuccacaaa

SEQ ID NO: 1158 - RNA, 19 nt, Artificial Sequence
  Synthetic
uggcagcacuucagaccaa

SEQ ID NO: 1159 - RNA, 19 nt, Artificial Sequence
  Synthetic
aaaucuaccaugagaaaca

SEQ ID NO: 1160 - RNA, 19 nt, Artificial Sequence
  Synthetic
ugacagugguagcaaaaua

SEQ ID NO: 1161 - RNA, 19 nt, Artificial Sequence
  Synthetic
gcaacuacgaugugaaugu

SEQ ID NO: 1162 - RNA, 19 nt, Artificial Sequence
  Synthetic
ggaaaguauugugaagaca

SEQ ID NO: 1163 - RNA, 19 nt, Artificial Sequence
  Synthetic
gggagggaauccuagcuua

SEQ ID NO: 1164 - RNA, 19 nt, Artificial Sequence
  Synthetic
cgggauacgcugcaagaga

SEQ ID NO: 1165 - RNA, 19 nt, Artificial Sequence
  Synthetic
ccacuggcacugucagaua

SEQ ID NO: 1166 - RNA, 19 nt, Artificial Sequence
  Synthetic
caagauggcaguaaagaaa

SEQ ID NO: 1167 - RNA, 19 nt, Artificial Sequence
  Synthetic
aggagcaggugguggauua

SEQ ID NO: 1168 - RNA, 19 nt, Artificial Sequence
  Synthetic
gaauugacccagauggaaa

SEQ ID NO: 1169 - RNA, 19 nt, Artificial Sequence
  Synthetic
ggguauacauugugccuuu

SEQ ID NO: 1170 - RNA, 19 nt, Artificial Sequence
  Synthetic
ggucacagauggugcuauu

SEQ ID NO: 1171 - RNA, 19 nt, Artificial Sequence
  Synthetic
ccaaacaagucccaagaau

SEQ ID NO: 1172 - RNA, 19 nt, Artificial Sequence
  Synthetic
ugacccagauggaaaguaa

SEQ ID NO: 1173 - RNA, 19 nt, Artificial Sequence
  Synthetic
cacaguaguucaagacuua

SEQ ID NO: 1174 - RNA, 19 nt, Artificial Sequence
  Synthetic
caucaaauauuccaagcua

SEQ ID NO: 1175 - RNA, 19 nt, Artificial Sequence
  Synthetic
ccacaguaguucaagacuu

SEQ ID NO: 1176 - RNA, 19 nt, Artificial Sequence
  Synthetic
gauacaaccugaacaucaa

SEQ ID NO: 1177 - RNA, 19 nt, Artificial Sequence
  Synthetic
gcuauuaauugaacuggaa

SEQ ID NO: 1178 - RNA, 19 nt, Artificial Sequence
  Synthetic
ccugauggcuacuguggua

SEQ ID NO: 1179 - RNA, 19 nt, Artificial Sequence
  Synthetic
aagaacaaccucaaguaua

SEQ ID NO: 1180 - RNA, 19 nt, Artificial Sequence
  Synthetic
gauggaaaguaauugguau

SEQ ID NO: 1181 - RNA, 19 nt, Artificial Sequence
  Synthetic
ggucaguguuguuggaaua

SEQ ID NO: 1182 - RNA, 19 nt, Artificial Sequence
  Synthetic
agaaggaaaucuuggagaa

SEQ ID NO: 1183 - RNA, 19 nt, Artificial Sequence
  Synthetic
ugaaauuuggcuuggauua

SEQ ID NO: 1184 - RNA, 19 nt, Artificial Sequence
  Synthetic
agaaaggagugaagaugau

SEQ ID NO: 1185 - RNA, 19 nt, Artificial Sequence
  Synthetic
cagauuguguuaacagaaa

SEQ ID NO: 1186 - RNA, 19 nt, Artificial Sequence
  Synthetic
uggagaagaugaaguauuu

SEQ ID NO: 1187 - RNA, 19 nt, Artificial Sequence
  Synthetic
gaaccaagcgacagucaua

SEQ ID NO: 1188 - RNA, 19 nt, Artificial Sequence
  Synthetic
caucguuccuuuugugaua

SEQ ID NO: 1189 - RNA, 19 nt, Artificial Sequence
  Synthetic
agaaaguguucgucugcaa

SEQ ID NO: 1190 - RNA, 19 nt, Artificial Sequence
  Synthetic
gaagcagugucuauggaaa

SEQ ID NO: 1191 - RNA, 19 nt, Artificial Sequence
  Synthetic
guauauuccugaugcagaa

SEQ ID NO: 1192 - RNA, 19 nt, Artificial Sequence
  Synthetic
uggcacugcucaugugaaa

SEQ ID NO: 1193 - RNA, 19 nt, Artificial Sequence
  Synthetic
cuuugagacucccgaaaua

SEQ ID NO: 1194 - RNA, 19 nt, Artificial Sequence
  Synthetic
gagaaaggagugaagauga

SEQ ID NO: 1195 - RNA, 19 nt, Artificial Sequence
  Synthetic
ugaagaugauggaggcuuu

SEQ ID NO: 1196 - RNA, 19 nt, Artificial Sequence
  Synthetic
gacaaggagacaagagauu

SEQ ID NO: 1197 - RNA, 19 nt, Artificial Sequence
  Synthetic
gcagggaagcauuacguua

SEQ ID NO: 1198 - RNA, 19 nt, Artificial Sequence
  Synthetic
ccucaaaccugcacuuuau

SEQ ID NO: 1199 - RNA, 19 nt, Artificial Sequence
  Synthetic
cagggaagcauuacguuaa

SEQ ID NO: 1200 - RNA, 19 nt, Artificial Sequence
  Synthetic
uguaguguaucaaggcaaa

SEQ ID NO: 1201 - RNA, 19 nt, Artificial Sequence
  Synthetic
caugaaagcgacugcauuu

SEQ ID NO: 1202 - RNA, 19 nt, Artificial Sequence
  Synthetic
cgucagaguuugucaucca

SEQ ID NO: 1203 - RNA, 19 nt, Artificial Sequence
  Synthetic
ccguauaugucccagaaua

SEQ ID NO: 1204 - RNA, 19 nt, Artificial Sequence
  Synthetic
gcacacagccacaggugaa

SEQ ID NO: 1205 - RNA, 19 nt, Artificial Sequence
  Synthetic
gaacaucggcaaugggauu

SEQ ID NO: 1206 - RNA, 19 nt, Artificial Sequence
  Synthetic
ggacugagaaacagagcaa

SEQ ID NO: 1207 - RNA, 19 nt, Artificial Sequence
  Synthetic
gguuauaagugaggaaauu

SEQ ID NO: 1208 - RNA, 19 nt, Artificial Sequence
  Synthetic
aagcuaaauaccagaguua

SEQ ID NO: 1209 - RNA, 19 nt, Artificial Sequence
  Synthetic
guuagaggcuucaguguua

SEQ ID NO: 1210 - RNA, 19 nt, Artificial Sequence
  Synthetic
aaaugaagauaaagggaca

SEQ ID NO: 1211 - RNA, 19 nt, Artificial Sequence
  Synthetic
ggauaaagaaacaccaaau

SEQ ID NO: 1212 - RNA, 19 nt, Artificial Sequence
  Synthetic
gguuagaauucaaguaguu

SEQ ID NO: 1213 - RNA, 19 nt, Artificial Sequence
  Synthetic
gaaaagacaagauggauaa

SEQ ID NO: 1214 - RNA, 19 nt, Artificial Sequence
  Synthetic
aggaaagccaugaggaaga

SEQ ID NO: 1215 - RNA, 19 nt, Artificial Sequence
  Synthetic
cagaaaagaugcaguagaa

SEQ ID NO: 1216 - RNA, 19 nt, Artificial Sequence
  Synthetic
guacaggacuacaguguga

SEQ ID NO: 1217 - RNA, 19 nt, Artificial Sequence
  Synthetic
aaagaagagaagaggaaaa

SEQ ID NO: 1218 - RNA, 19 nt, Artificial Sequence
  Synthetic
ugaaaagacaagauggaua

SEQ ID NO: 1219 - RNA, 19 nt, Artificial Sequence
  Synthetic
agaggaaagccaugaggaa

SEQ ID NO: 1220 - RNA, 19 nt, Artificial Sequence
  Synthetic
gugcaaaguucauugggau

SEQ ID NO: 1221 - RNA, 19 nt, Artificial Sequence
  Synthetic
gccacaaacaguugacaaa

SEQ ID NO: 1222 - RNA, 19 nt, Artificial Sequence
  Synthetic
gccaaaugguagaggaaag

SEQ ID NO: 1223 - RNA, 19 nt, Artificial Sequence
  Synthetic
acucagaaguugauaaagu

SEQ ID NO: 1224 - RNA, 19 nt, Artificial Sequence
  Synthetic
caaaggacuuagaaggaca

SEQ ID NO: 1225 - RNA, 19 nt, Artificial Sequence
  Synthetic
gaaauaaucccuuaccaua

SEQ ID NO: 1226 - RNA, 19 nt, Artificial Sequence
  Synthetic
ggccauaaucuucaaguua

SEQ ID NO: 1227 - RNA, 19 nt, Artificial Sequence
  Synthetic
cugcugaggaguuggcaaa

SEQ ID NO: 1228 - RNA, 19 nt, Artificial Sequence
  Synthetic
acagagcaauggugacaaa

SEQ ID NO: 1229 - RNA, 19 nt, Artificial Sequence
  Synthetic
gcuuuauggcugaagaauu

SEQ ID NO: 1230 - RNA, 19 nt, Artificial Sequence
  Synthetic
ucaaaugcggucuggauaa

SEQ ID NO: 1231 - RNA, 19 nt, Artificial Sequence
  Synthetic
cuacaaaaccagccaguua

SEQ ID NO: 1232 - RNA, 19 nt, Artificial Sequence
  Synthetic
gauaaagggacaaaggcau

SEQ ID NO: 1233 - RNA, 19 nt, Artificial Sequence
  Synthetic
ugaggaagacucugagcaa

SEQ ID NO: 1234 - RNA, 19 nt, Artificial Sequence
  Synthetic
caaccaagagaauggagua

SEQ ID NO: 1235 - RNA, 19 nt, Artificial Sequence
  Synthetic
agugaagaguuaugcaaga

SEQ ID NO: 1236 - RNA, 19 nt, Artificial Sequence
  Synthetic
gcaagaacggcaaggacaa

SEQ ID NO: 1237 - RNA, 19 nt, Artificial Sequence
  Synthetic
cagcagacgcagcagaaua

SEQ ID NO: 1238 - RNA, 19 nt, Artificial Sequence
  Synthetic
gauacaauguuaagagacu

SEQ ID NO: 1239 - RNA, 19 nt, Artificial Sequence
  Synthetic
gcaaggacaaggagaagga

SEQ ID NO: 1240 - RNA, 19 nt, Artificial Sequence
  Synthetic
guucuaccuucgaggauuu

SEQ ID NO: 1241 - RNA, 19 nt, Artificial Sequence
  Synthetic
acaaggagaaggagaagca

SEQ ID NO: 1242 - RNA, 19 nt, Artificial Sequence
  Synthetic
agaagcagcgcaaggagaa

SEQ ID NO: 1243 - RNA, 19 nt, Artificial Sequence
  Synthetic
agagagaccagcaaagaga

SEQ ID NO: 1244 - RNA, 19 nt, Artificial Sequence
  Synthetic
caaacaaacucaagugcaa

SEQ ID NO: 1245 - RNA, 19 nt, Artificial Sequence
  Synthetic
cgacgaagaacuugccaaa

SEQ ID NO: 1246 - RNA, 19 nt, Artificial Sequence
  Synthetic
gaguaauggccacaggaaa

SEQ ID NO: 1247 - RNA, 19 nt, Artificial Sequence
  Synthetic
agacagaacaccagcuaau

SEQ ID NO: 1248 - RNA, 19 nt, Artificial Sequence
  Synthetic
uggaggagcacuugacaaa

SEQ ID NO: 1249 - RNA, 19 nt, Artificial Sequence
  Synthetic
ccagcuaaugaaagaguua

SEQ ID NO: 1250 - RNA, 19 nt, Artificial Sequence
  Synthetic
augaaagaguuaagcguga

SEQ ID NO: 1251 - RNA, 19 nt, Artificial Sequence
  Synthetic
gggcagaugcugaauguga

SEQ ID NO: 1252 - RNA, 19 nt, Artificial Sequence
  Synthetic
ccuaagugauacugcauuu

SEQ ID NO: 1253 - RNA, 19 nt, Artificial Sequence
  Synthetic
uggagaagcaggacaagua

SEQ ID NO: 1254 - RNA, 19 nt, Artificial Sequence
  Synthetic
gcaaaggaaacgcgacgaa

SEQ ID NO: 1255 - RNA, 19 nt, Artificial Sequence
  Synthetic
ggaugggcccuaagugaua

SEQ ID NO: 1256 - RNA, 19 nt, Artificial Sequence
  Synthetic
ggucagaggugcaaaguug

SEQ ID NO: 1257 - RNA, 19 nt, Artificial Sequence
  Synthetic
gaggauucccugaggccua

SEQ ID NO: 1258 - RNA, 19 nt, Artificial Sequence
  Synthetic
gcgaagagcacuuggcgga

SEQ ID NO: 1259 - RNA, 19 nt, Artificial Sequence
  Synthetic
caacagaugcucaacaaau

SEQ ID NO: 1260 - RNA, 19 nt, Artificial Sequence
  Synthetic
acgagaagcuggcccuaua

SEQ ID NO: 1261 - RNA, 19 nt, Artificial Sequence
  Synthetic
gggagcagacggugcacua

SEQ ID NO: 1262 - RNA, 19 nt, Artificial Sequence
  Synthetic
gaggagcacuugacaaaga

SEQ ID NO: 1263 - RNA, 19 nt, Artificial Sequence
  Synthetic
agguggagaagcaggacaa

SEQ ID NO: 1264 - RNA, 19 nt, Artificial Sequence
  Synthetic
caguuaggcuggagaaaug

SEQ ID NO: 1265 - RNA, 19 nt, Artificial Sequence
  Synthetic
uggccgagguggagaagca

SEQ ID NO: 1266 - RNA, 19 nt, Artificial Sequence
  Synthetic
aaacucaagugcaaaggaa

SEQ ID NO: 1267 - RNA, 19 nt, Artificial Sequence
  Synthetic
aaggaaacgcgacgaagaa

SEQ ID NO: 1268 - RNA, 19 nt, Artificial Sequence
  Synthetic
ggagaaaugagacagaaca

SEQ ID NO: 1269 - RNA, 19 nt, Artificial Sequence
  Synthetic
gacaacuggugcaaacaaa

SEQ ID NO: 1270 - RNA, 19 nt, Artificial Sequence
  Synthetic
gcucaguaacggacacuau

SEQ ID NO: 1271 - RNA, 19 nt, Artificial Sequence
  Synthetic
acacuaugaugcuguauuu

SEQ ID NO: 1272 - RNA, 19 nt, Artificial Sequence
  Synthetic
ccaccuaccuugaguaaug

SEQ ID NO: 1273 - RNA, 19 nt, Artificial Sequence
  Synthetic
gaaaugagacagaacacca

SEQ ID NO: 1274 - RNA, 19 nt, Artificial Sequence
  Synthetic
agaaauaacucccaaacaa

SEQ ID NO: 1275 - RNA, 19 nt, Artificial Sequence
  Synthetic
aggcaacaauuuagaagaa

SEQ ID NO: 1276 - RNA, 19 nt, Artificial Sequence
  Synthetic
gugcaagucugaagaauga

SEQ ID NO: 1277 - RNA, 19 nt, Artificial Sequence
  Synthetic
gaaagaaagaagcguagaa

SEQ ID NO: 1278 - RNA, 19 nt, Artificial Sequence
  Synthetic
ccaagaaguuacugaugau

SEQ ID NO: 1279 - RNA, 19 nt, Artificial Sequence
  Synthetic
ggaagacucacuaguaaua

SEQ ID NO: 1280 - RNA, 19 nt, Artificial Sequence
  Synthetic
acaggaugcucacgaauua

SEQ ID NO: 1281 - RNA, 19 nt, Artificial Sequence
  Synthetic
caaauuaccugccgcacaa

SEQ ID NO: 1282 - RNA, 19 nt, Artificial Sequence
  Synthetic
ggagcagcagucagaaaua

SEQ ID NO: 1283 - RNA, 19 nt, Artificial Sequence
  Synthetic
gggagguaccuuugucuaa

SEQ ID NO: 1284 - RNA, 19 nt, Artificial Sequence
  Synthetic
cagcaggaauauauguuau

SEQ ID NO: 1285 - RNA, 19 nt, Artificial Sequence
  Synthetic
ugacaacuguacaaagauu

SEQ ID NO: 1286 - RNA, 19 nt, Artificial Sequence
  Synthetic
caacacaacccuaaacuga

SEQ ID NO: 1287 - RNA, 19 nt, Artificial Sequence
  Synthetic
aggugguucuguuguguua

SEQ ID NO: 1288 - RNA, 19 nt, Artificial Sequence
  Synthetic
auggaagacucacuaguaa

SEQ ID NO: 1289 - RNA, 19 nt, Artificial Sequence
  Synthetic
ccacaccaguucugaauca

SEQ ID NO: 1290 - RNA, 19 nt, Artificial Sequence
  Synthetic
ugauauugcuguagguuua

SEQ ID NO: 1291 - RNA, 19 nt, Artificial Sequence
  Synthetic
caugaaacuuugugaagaa

SEQ ID NO: 1292 - RNA, 19 nt, Artificial Sequence
  Synthetic
ggugaaagauccaacuaaa

SEQ ID NO: 1293 - RNA, 19 nt, Artificial Sequence
  Synthetic
ggaaauggagacacagaaa

SEQ ID NO: 1294 - RNA, 19 nt, Artificial Sequence
  Synthetic
agaaaguaccguaagauaa

SEQ ID NO: 1295 - RNA, 19 nt, Artificial Sequence
  Synthetic
gcaaauagaguuuaaguga

SEQ ID NO: 1296 - RNA, 19 nt, Artificial Sequence
  Synthetic
gagcaauagcugagaaucu

SEQ ID NO: 1297 - RNA, 19 nt, Artificial Sequence
  Synthetic
gcacagacuuauacucuua

SEQ ID NO: 1298 - RNA, 19 nt, Artificial Sequence
  Synthetic
gugaauuucucaagguauu

SEQ ID NO: 1299 - RNA, 19 nt, Artificial Sequence
  Synthetic
gaucaaagaaaguaguaca

SEQ ID NO: 1300 - RNA, 19 nt, Artificial Sequence
  Synthetic
ggaggaaaaugcagaaauu

SEQ ID NO: 1301 - RNA, 19 nt, Artificial Sequence
  Synthetic
uagaaaguaccguaagaua

SEQ ID NO: 1302 - RNA, 19 nt, Artificial Sequence
  Synthetic
gcucuaugcuuuaugaaaa

SEQ ID NO: 1303 - RNA, 19 nt, Artificial Sequence
  Synthetic
auaaggaaauggagacaca

SEQ ID NO: 1304 - RNA, 19 nt, Artificial Sequence
  Synthetic
cucagaauguuuagaagaa

SEQ ID NO: 1305 - RNA, 19 nt, Artificial Sequence
  Synthetic
aaauggagacacagaaauu

SEQ ID NO: 1306 - RNA, 19 nt, Artificial Sequence
  Synthetic
cgugaaucauguaaagaga

SEQ ID NO: 1307 - RNA, 19 nt, Artificial Sequence
  Synthetic
gcucagaauguuuagaaga

SEQ ID NO: 1308 - RNA, 19 nt, Artificial Sequence
  Synthetic
gagaaucuguggucaguuu

SEQ ID NO: 1309 - RNA, 19 nt, Artificial Sequence
  Synthetic
gggugaaagauccaacuaa

SEQ ID NO: 1310 - RNA, 19 nt, Artificial Sequence
  Synthetic
gagaaagccaaaagaagua

SEQ ID NO: 1311 - RNA, 19 nt, Artificial Sequence
  Synthetic
cagcuuauccucauauaua

SEQ ID NO: 1312 - RNA, 19 nt, Artificial Sequence
  Synthetic
ugaggcaaauagaguuuaa

SEQ ID NO: 1313 - RNA, 19 nt, Artificial Sequence
  Synthetic
ucuagaaaguaccguaaga

SEQ ID NO: 1314 - RNA, 19 nt, Artificial Sequence
  Synthetic
gccuggaaauaaacacaua

SEQ ID NO: 1315 - RNA, 19 nt, Artificial Sequence
  Synthetic
gaacagagccccauuguau

SEQ ID NO: 1316 - RNA, 19 nt, Artificial Sequence
  Synthetic
uuacugaucugaugaauga

SEQ ID NO: 1317 - RNA, 19 nt, Artificial Sequence
  Synthetic
uguuacagcucuaugcuuu

SEQ ID NO: 1318 - RNA, 19 nt, Artificial Sequence
  Synthetic
guaauaccauaaagugaga

SEQ ID NO: 1319 - RNA, 19 nt, Artificial Sequence
  Synthetic
cagaauguuuagaagaaag

SEQ ID NO: 1320 - RNA, 19 nt, Artificial Sequence
  Synthetic
ccaaagaggcauucagcaa

SEQ ID NO: 1321 - RNA, 19 nt, Artificial Sequence
  Synthetic
caaacaaaaugaugggaaa

SEQ ID NO: 1322 - RNA, 19 nt, Artificial Sequence
  Synthetic
cuuuagaaacugucagaaa

SEQ ID NO: 1323 - RNA, 19 nt, Artificial Sequence
  Synthetic
guucaacaguccagaguau

SEQ ID NO: 1324 - RNA, 19 nt, Artificial Sequence
  Synthetic
ucaaagagaugaggaaaua

SEQ ID NO: 1325 - RNA, 19 nt, Artificial Sequence
  Synthetic
gcacuaagucgccaagaaa

SEQ ID NO: 1326 - RNA, 19 nt, Artificial Sequence
  Synthetic
acgaagaugaggaggauuu

SEQ ID NO: 1327 - RNA, 19 nt, Artificial Sequence
  Synthetic
gaaacagccuucuggaaau

SEQ ID NO: 1328 - RNA, 19 nt, Artificial Sequence
  Synthetic
ccgcagggcuauucagcua

SEQ ID NO: 1329 - RNA, 19 nt, Artificial Sequence
  Synthetic
caagguaguuccagaaaca

SEQ ID NO: 1330 - RNA, 19 nt, Artificial Sequence
  Synthetic
caaauuaaccuuucaggaa

SEQ ID NO: 1331 - RNA, 19 nt, Artificial Sequence
  Synthetic
caggaauguuagacgaaga

SEQ ID NO: 1332 - RNA, 19 nt, Artificial Sequence
  Synthetic
aguaaugguucuagaagga

SEQ ID NO: 1333 - RNA, 19 nt, Artificial Sequence
  Synthetic
aauuacaacaggaagguua

SEQ ID NO: 1334 - RNA, 19 nt, Artificial Sequence
  Synthetic
cgagaagccuacuuugaaa

SEQ ID NO: 1335 - RNA, 19 nt, Artificial Sequence
  Synthetic
ugacauggaagaugaggaa

SEQ ID NO: 1336 - RNA, 19 nt, Artificial Sequence
  Synthetic
uggagaagaauuagcacaa

SEQ ID NO: 1337 - RNA, 19 nt, Artificial Sequence
  Synthetic
cuugacggguccagaauua

SEQ ID NO: 1338 - RNA, 19 nt, Artificial Sequence
  Synthetic
caacagaugcaucgaccaa

SEQ ID NO: 1339 - RNA, 19 nt, Artificial Sequence
  Synthetic
acuaagucgccaagaaauu

SEQ ID NO: 1340 - RNA, 19 nt, Artificial Sequence
  Synthetic
gaucacaacuuuucugcua

SEQ ID NO: 1341 - RNA, 19 nt, Artificial Sequence
  Synthetic
gcucaacauugccugaaua

SEQ ID NO: 1342 - RNA, 19 nt, Artificial Sequence
  Synthetic
agaccuggaacgaguguua

SEQ ID NO: 1343 - RNA, 19 nt, Artificial Sequence
  Synthetic
gguaaugugucaaagagau

SEQ ID NO: 1344 - RNA, 19 nt, Artificial Sequence
  Synthetic
ggaagagacgagaagccua

SEQ ID NO: 1345 - RNA, 19 nt, Artificial Sequence
  Synthetic
ccaagaaauugacauggaa

SEQ ID NO: 1346 - RNA, 19 nt, Artificial Sequence
  Synthetic
ugaaaucagccuugcacaa

SEQ ID NO: 1347 - RNA, 19 nt, Artificial Sequence
  Synthetic
acaggaagguuauucuaua

SEQ ID NO: 1348 - RNA, 19 nt, Artificial Sequence
  Synthetic
aagaaauugacauggaaga

SEQ ID NO: 1349 - RNA, 19 nt, Artificial Sequence
  Synthetic
agguaguuccagaaacaua

SEQ ID NO: 1350 - RNA, 19 nt, Artificial Sequence
  Synthetic
gggaagaaauggaaagaau

SEQ ID NO: 1351 - RNA, 19 nt, Artificial Sequence
  Synthetic
gcuaagaucucaaguaaaa

SEQ ID NO: 1352 - RNA, 19 nt, Artificial Sequence
  Synthetic
ucucaaaggcugcgcauua

SEQ ID NO: 1353 - RNA, 19 nt, Artificial Sequence
  Synthetic
aggaaaggguuguagauga

SEQ ID NO: 1354 - RNA, 19 nt, Artificial Sequence
  Synthetic
ccgacuaccuuguggucua

SEQ ID NO: 1355 - RNA, 19 nt, Artificial Sequence
  Synthetic
ccgaauucagcaagagauu

SEQ ID NO: 1356 - RNA, 19 nt, Artificial Sequence
  Synthetic
agaccaggccugacggcaa

SEQ ID NO: 1357 - RNA, 19 nt, Artificial Sequence
  Synthetic
cugccaagagcaaggaaga

SEQ ID NO: 1358 - RNA, 19 nt, Artificial Sequence
  Synthetic
agguggagcccaugugcaa

SEQ ID NO: 1359 - RNA, 19 nt, Artificial Sequence
  Synthetic
gagcagguggagaggcaga

SEQ ID NO: 1360 - RNA, 19 nt, Artificial Sequence
  Synthetic
aggaagaccugguguccca

SEQ ID NO: 1361 - RNA, 19 nt, Artificial Sequence
  Synthetic
cggccuggacacuacgaua

SEQ ID NO: 1362 - RNA, 19 nt, Artificial Sequence
  Synthetic
aagagauugcugugcagaa

SEQ ID NO: 1363 - RNA, 19 nt, Artificial Sequence
  Synthetic
agaucaaggaccuccacaa

SEQ ID NO: 1364 - RNA, 19 nt, Artificial Sequence
  Synthetic
ucuaucaacagaagaucaa

SEQ ID NO: 1365 - RNA, 19 nt, Artificial Sequence
  Synthetic
acaaggaguaugcugaaga

SEQ ID NO: 1366 - RNA, 19 nt, Artificial Sequence
  Synthetic
caaggaguaugcugaagau

SEQ ID NO: 1367 - RNA, 19 nt, Artificial Sequence
  Synthetic
ggaguaugcugaagaugac

SEQ ID NO: 1368 - RNA, 19 nt, Artificial Sequence
  Synthetic
ccaccaauccgcacaucuu

SEQ ID NO: 1369 - RNA, 19 nt, Artificial Sequence
  Synthetic
ggccuggacacuacgauau

SEQ ID NO: 1370 - RNA, 19 nt, Artificial Sequence
  Synthetic
ccgaagguguuaacugucu

SEQ ID NO: 1371 - RNA, 19 nt, Artificial Sequence
  Synthetic
caauaaggcuguagaagaa

SEQ ID NO: 1372 - RNA, 19 nt, Artificial Sequence
  Synthetic
ggcauuaauucauggacua

SEQ ID NO: 1373 - RNA, 19 nt, Artificial Sequence
  Synthetic
cugaacagcuggcaauaaa

SEQ ID NO: 1374 - RNA, 19 nt, Artificial Sequence
  Synthetic
cagaagauguugcuaaauu

SEQ ID NO: 1375 - RNA, 19 nt, Artificial Sequence
  Synthetic
acaauaaggcuguagaaga

SEQ ID NO: 1376 - RNA, 19 nt, Artificial Sequence
  Synthetic
aaggaaagguuguuauuga

SEQ ID NO: 1377 - RNA, 19 nt, Artificial Sequence
  Synthetic
ccagaaauauggacagacu

SEQ ID NO: 1378 - RNA, 19 nt, Artificial Sequence
  Synthetic
guuugacacuucaggacua

SEQ ID NO: 1379 - RNA, 19 nt, Artificial Sequence
  Synthetic
cuuaagaguuguaguuacu

SEQ ID NO: 1380 - RNA, 19 nt, Artificial Sequence
  Synthetic
aggagaagcugcaggagaa

SEQ ID NO: 1381 - RNA, 19 nt, Artificial Sequence
  Synthetic
gggccaaguuccuggacua

SEQ ID NO: 1382 - RNA, 19 nt, Artificial Sequence
  Synthetic
ggauauggccggaguguuu

SEQ ID NO: 1383 - RNA, 19 nt, Artificial Sequence
  Synthetic
uggcaaagacaguaacaaa

SEQ ID NO: 1384 - RNA, 19 nt, Artificial Sequence
  Synthetic
gcucaaaagaagagguauu

SEQ ID NO: 1385 - RNA, 19 nt, Artificial Sequence
  Synthetic
ugacagacuugguggauga

SEQ ID NO: 1386 - RNA, 19 nt, Artificial Sequence
  Synthetic
ccaagaucaugaaggcaaa

SEQ ID NO: 1387 - RNA, 19 nt, Artificial Sequence
  Synthetic
caacaugaaauaugagcua

SEQ ID NO: 1388 - RNA, 19 nt, Artificial Sequence
  Synthetic
ggaucaaggucgaggugca

SEQ ID NO: 1389 - RNA, 19 nt, Artificial Sequence
  Synthetic
cggaugaugaugaggaauu

SEQ ID NO: 1390 - RNA, 19 nt, Artificial Sequence
  Synthetic
gaugaagacuggaaugaau

SEQ ID NO: 1391 - RNA, 19 nt, Artificial Sequence
  Synthetic
ggaaauugagacaguacaa

SEQ ID NO: 1392 - RNA, 19 nt, Artificial Sequence
  Synthetic
cagaaauacuggauugaca

SEQ ID NO: 1393 - RNA, 19 nt, Artificial Sequence
  Synthetic
aggaaugagccaugaagaa

SEQ ID NO: 1394 - RNA, 19 nt, Artificial Sequence
  Synthetic
gcagauggauugcaguaua

SEQ ID NO: 1395 - RNA, 19 nt, Artificial Sequence
  Synthetic
caccaaggaaagaaagaaa

SEQ ID NO: 1396 - RNA, 19 nt, Artificial Sequence
  Synthetic
ccacaucacuggagccauu

SEQ ID NO: 1397 - RNA, 19 nt, Artificial Sequence
  Synthetic
ccaaagaguucuaccacga

SEQ ID NO: 1398 - RNA, 19 nt, Artificial Sequence
  Synthetic
gauuaagccugcagacaca

SEQ ID NO: 1399 - RNA, 19 nt, Artificial Sequence
  Synthetic
ggacaugaaccauacgaau

SEQ ID NO: 1400 - RNA, 19 nt, Artificial Sequence
  Synthetic
ccaaauugcaggauaccua

SEQ ID NO: 1401 - RNA, 19 nt, Artificial Sequence
  Synthetic
ccaagaaugugcuuaagaa

SEQ ID NO: 1402 - RNA, 19 nt, Artificial Sequence
  Synthetic
gauaagggcuggcguguca

SEQ ID NO: 1403 - RNA, 19 nt, Artificial Sequence
  Synthetic
cagacuugguggaugacaa

SEQ ID NO: 1404 - RNA, 19 nt, Artificial Sequence
  Synthetic
agaacaacgucgucaucaa

SEQ ID NO: 1405 - RNA, 19 nt, Artificial Sequence
  Synthetic
ccuauaagcaugacaccaa

SEQ ID NO: 1406 - RNA, 19 nt, Artificial Sequence
  Synthetic
caauguauauguaggcuuu

SEQ ID NO: 1407 - RNA, 19 nt, Artificial Sequence
  Synthetic
aagacugaguggaggguca

SEQ ID NO: 1408 - RNA, 19 nt, Artificial Sequence
  Synthetic
gaaucuaugaaguggaaga

SEQ ID NO: 1409 - RNA, 19 nt, Artificial Sequence
  Synthetic
cgagugaaggcgagugcaa

SEQ ID NO: 1410 - RNA, 19 nt, Artificial Sequence
  Synthetic
ggacaugaaccaagacaaa

SEQ ID NO: 1411 - RNA, 19 nt, Artificial Sequence
  Synthetic
caauaaagaauguuggcaa

SEQ ID NO: 1412 - RNA, 19 nt, Artificial Sequence
  Synthetic
cuguagaagaagaagauaa

SEQ ID NO: 1413 - RNA, 19 nt, Artificial Sequence
  Synthetic
caauggaaguuauggguuu

SEQ ID NO: 1414 - RNA, 19 nt, Artificial Sequence
  Synthetic
acaaugaaucagugguaaa

SEQ ID NO: 1415 - RNA, 19 nt, Artificial Sequence
  Synthetic
ggacagacuucuuagacuu

SEQ ID NO: 1416 - RNA, 19 nt, Artificial Sequence
  Synthetic
uaaaggagauguuggaauu

SEQ ID NO: 1417 - RNA, 19 nt, Artificial Sequence
  Synthetic
gauuauaccgucagaguga

SEQ ID NO: 1418 - RNA, 19 nt, Artificial Sequence
  Synthetic
guaaaggagauguuggaau

SEQ ID NO: 1419 - RNA, 19 nt, Artificial Sequence
  Synthetic
acacaaugaaucaguggua

SEQ ID NO: 1420 - RNA, 19 nt, Artificial Sequence
  Synthetic
caaauauuguccaguguuu

SEQ ID NO: 1421 - RNA, 19 nt, Artificial Sequence
  Synthetic
guacuuaugaccucaaaua

SEQ ID NO: 1422 - RNA, 19 nt, Artificial Sequence
  Synthetic
aaucagugguaaaggagau

SEQ ID NO: 1423 - RNA, 19 nt, Artificial Sequence
  Synthetic
cagcagaacaagucuauau

SEQ ID NO: 1424 - RNA, 19 nt, Artificial Sequence
  Synthetic
ggucuuaggacaugaacca

SEQ ID NO: 1425 - RNA, 19 nt, Artificial Sequence
  Synthetic
aagaagaguuggauggaag

SEQ ID NO: 1426 - RNA, 19 nt, Artificial Sequence
  Synthetic
gaagaagaagauaagauga

SEQ ID NO: 1427 - RNA, 19 nt, Artificial Sequence
  Synthetic
agaguuggauggaagguuu

SEQ ID NO: 1428 - RNA, 19 nt, Artificial Sequence
  Synthetic
gaaccaagacaaacaacuu

SEQ ID NO: 1429 - RNA, 19 nt, Artificial Sequence
  Synthetic
ggguuugaugcuuggagaa

SEQ ID NO: 1430 - RNA, 19 nt, Artificial Sequence
  Synthetic
cagagugauugauguguuu

SEQ ID NO: 1431 - RNA, 19 nt, Artificial Sequence
  Synthetic
uguuagagguggaggauuu

SEQ ID NO: 1432 - RNA, 19 nt, Artificial Sequence
  Synthetic
ggacuuugacuuugagaaa

SEQ ID NO: 1433 - RNA, 19 nt, Artificial Sequence
  Synthetic
acauaaaggccaaugauua

SEQ ID NO: 1434 - RNA, 19 nt, Artificial Sequence
  Synthetic
uuggagagcugaugagaaa

SEQ ID NO: 1435 - RNA, 19 nt, Artificial Sequence
  Synthetic
aggcaaaugguaugaauua

SEQ ID NO: 1436 - RNA, 19 nt, Artificial Sequence
  Synthetic
cugaagaaguacacaagaa

SEQ ID NO: 1437 - RNA, 19 nt, Artificial Sequence
  Synthetic
ggaacuacuuucuggaaga

SEQ ID NO: 1438 - RNA, 19 nt, Artificial Sequence
  Synthetic
gaagaaguacacaagaaua

SEQ ID NO: 1439 - RNA, 19 nt, Artificial Sequence
  Synthetic
gagaaggaauauaagacuu

SEQ ID NO: 1440 - RNA, 19 nt, Artificial Sequence
  Synthetic
ggcugaugaugguaaauaa

SEQ ID NO: 1441 - RNA, 19 nt, Artificial Sequence
  Synthetic
gagauaaugaugaaaccaa

SEQ ID NO: 1442 - RNA, 19 nt, Artificial Sequence
  Synthetic
acagauaauuccuuccaaa

SEQ ID NO: 1443 - RNA, 19 nt, Artificial Sequence
  Synthetic
ggaagaggcgagauaauga

SEQ ID NO: 1444 - RNA, 19 nt, Artificial Sequence
  Synthetic
gggaguaguugaagaacag

SEQ ID NO: 1445 - RNA, 19 nt, Artificial Sequence
  Synthetic
gaggcgagauaaugaugaa

SEQ ID NO: 1446 - RNA, 19 nt, Artificial Sequence
  Synthetic
gcaaaugguaugaauuaca

SEQ ID NO: 1447 - RNA, 19 nt, Artificial Sequence
  Synthetic
guaaauaagaacacagaag

SEQ ID NO: 1448 - RNA, 19 nt, Artificial Sequence
  Synthetic
gcaagcagaaagccaguaa

SEQ ID NO: 1449 - RNA, 19 nt, Artificial Sequence
  Synthetic
ccaaggagguggaggagaa

SEQ ID NO: 1450 - RNA, 19 nt, Artificial Sequence
  Synthetic
ugaccaaggagguggagga

SEQ ID NO: 1451 - RNA, 19 nt, Artificial Sequence
  Synthetic
gggaaaggccagcacuuca

SEQ ID NO: 1452 - RNA, 19 nt, Artificial Sequence
  Synthetic
cggcaacuaugaugucaau

SEQ ID NO: 1453 - RNA, 19 nt, Artificial Sequence
  Synthetic
gcgaggugcugcugguagu

SEQ ID NO: 1454 - RNA, 19 nt, Artificial Sequence
  Synthetic
gcaacuaugaugucaaugu

SEQ ID NO: 1455 - RNA, 19 nt, Artificial Sequence
  Synthetic
uggacggugucuacuacaa

SEQ ID NO: 1456 - RNA, 19 nt, Artificial Sequence
  Synthetic
ggaaaggccagcacuucau

SEQ ID NO: 1457 - RNA, 19 nt, Artificial Sequence
  Synthetic
acuaugaugucaaugugau

SEQ ID NO: 1458 - RNA, 19 nt, Artificial Sequence
  Synthetic
ccgcugcugccucaauaaa

SEQ ID NO: 1459 - RNA, 19 nt, Artificial Sequence
  Synthetic
ggaggcugccgaugagauc

SEQ ID NO: 1460 - RNA, 19 nt, Artificial Sequence
  Synthetic
gcaccggcaacuaugaugu

SEQ ID NO: 1461 - RNA, 19 nt, Artificial Sequence
  Synthetic
gcugcugccucaauaaauc

SEQ ID NO: 1462 - RNA, 19 nt, Artificial Sequence
  Synthetic
caacuaugaugucaaugug

SEQ ID NO: 1463 - RNA, 19 nt, Artificial Sequence
  Synthetic
ccgaugagaucugcaagag

SEQ ID NO: 1464 - RNA, 19 nt, Artificial Sequence
  Synthetic
ggacggugucuacuacaac

SEQ ID NO: 1465 - RNA, 19 nt, Artificial Sequence
  Synthetic
ugccgcugcugccucaaua

SEQ ID NO: 1466 - RNA, 19 nt, Artificial Sequence
  Synthetic
gguggacggugucuacuac

SEQ ID NO: 1467 - RNA, 19 nt, Artificial Sequence
  Synthetic
gaggugcugcugguaguga

SEQ ID NO: 1468 - RNA, 19 nt, Artificial Sequence
  Synthetic
gaaaggccagcacuucaug

SEQ ID NO: 1469 - RNA, 19 nt, Artificial Sequence
  Synthetic
gcgaauuacucgaggagau

SEQ ID NO: 1470 - RNA, 19 nt, Artificial Sequence
  Synthetic
ccucaugcauuguggguua

SEQ ID NO: 1471 - RNA, 19 nt, Artificial Sequence
  Synthetic
gauuauauuucuagggaca

SEQ ID NO: 1472 - RNA, 19 nt, Artificial Sequence
  Synthetic
ggaguggacuggagcguaa

SEQ ID NO: 1473 - RNA, 19 nt, Artificial Sequence
  Synthetic
gaacaaacgcuaacuaaua

SEQ ID NO: 1474 - RNA, 19 nt, Artificial Sequence
  Synthetic
aagaagauggugugggaaa

SEQ ID NO: 1475 - RNA, 19 nt, Artificial Sequence
  Synthetic
gguaaaucucuuugaacaa

SEQ ID NO: 1476 - RNA, 19 nt, Artificial Sequence
  Synthetic
ggguaaaucucuuugaaca

SEQ ID NO: 1477 - RNA, 19 nt, Artificial Sequence
  Synthetic
cagagaagauggucggaau

SEQ ID NO: 1478 - RNA, 19 nt, Artificial Sequence
  Synthetic
ggaagaagaugguguggga

SEQ ID NO: 1479 - RNA, 19 nt, Artificial Sequence
  Synthetic
ggagauauucagacauuaa

SEQ ID NO: 1480 - RNA, 19 nt, Artificial Sequence
  Synthetic
ggacaaaccuaucacauuu

SEQ ID NO: 1481 - RNA, 19 nt, Artificial Sequence
  Synthetic
caaagaagucagauggaca

SEQ ID NO: 1482 - RNA, 19 nt, Artificial Sequence
  Synthetic
ggaaaucaguaaugcccua

SEQ ID NO: 1483 - RNA, 19 nt, Artificial Sequence
  Synthetic
agagaaguaccgaaaguua

SEQ ID NO: 1484 - RNA, 19 nt, Artificial Sequence
  Synthetic
gaggagauauucagacauu

SEQ ID NO: 1485 - RNA, 19 nt, Artificial Sequence
  Synthetic
ccacaaagcccaugguaac

SEQ ID NO: 1486 - RNA, 19 nt, Artificial Sequence
  Synthetic
gcugaaacuggguaauaaa

SEQ ID NO: 1487 - RNA, 19 nt, Artificial Sequence
  Synthetic
ggaacaacaugcugaaacu

SEQ ID NO: 1488 - RNA, 19 nt, Artificial Sequence
  Synthetic
aaagagagggacagaagaa

SEQ ID NO: 1489 - RNA, 19 nt, Artificial Sequence
  Synthetic
ggaggaaagugucaauaau

SEQ ID NO: 1490 - RNA, 19 nt, Artificial Sequence
  Synthetic
aaagagagaaguaccgaaa

SEQ ID NO: 1491 - RNA, 19 nt, Artificial Sequence
  Synthetic
gcaaaaucacggagucaaa

SEQ ID NO: 1492 - RNA, 19 nt, Artificial Sequence
  Synthetic
uuacagaggacauggaaaa

SEQ ID NO: 1493 - RNA, 19 nt, Artificial Sequence
  Synthetic
uggaaaaggaaaucaguaa

SEQ ID NO: 1494 - RNA, 19 nt, Artificial Sequence
  Synthetic
gaugaaaguaagaccaaaa

SEQ ID NO: 1495 - RNA, 19 nt, Artificial Sequence
  Synthetic
caguaaugcccuaggccau

SEQ ID NO: 1496 - RNA, 19 nt, Artificial Sequence
  Synthetic
caugaaaccacacgagauu

SEQ ID NO: 1497 - RNA, 19 nt, Artificial Sequence
  Synthetic
aagaggaaagagagaagua

SEQ ID NO: 1498 - RNA, 19 nt, Artificial Sequence
  Synthetic
ugaugaaauaccagccaaa

SEQ ID NO: 1499 - RNA, 19 nt, Artificial Sequence
  Synthetic
cagaagagcugaaggcaga

SEQ ID NO: 1500 - RNA, 19 nt, Artificial Sequence
  Synthetic
ccagcuggguagugcggua

SEQ ID NO: 1501 - RNA, 19 nt, Artificial Sequence
  Synthetic
uggaauucucuguggaaaa

SEQ ID NO: 1502 - RNA, 19 nt, Artificial Sequence
  Synthetic
ugucauuccugaaaagaaa

SEQ ID NO: 1503 - RNA, 19 nt, Artificial Sequence
  Synthetic
ccaaagcagaagagcugaa

SEQ ID NO: 1504 - RNA, 19 nt, Artificial Sequence
  Synthetic
gaagguagacccuggccua

SEQ ID NO: 1505 - RNA, 19 nt, Artificial Sequence
  Synthetic
aguggagacauguggaauu

SEQ ID NO: 1506 - RNA, 19 nt, Artificial Sequence
  Synthetic
ccuucauccucuauaacaa

SEQ ID NO: 1507 - RNA, 19 nt, Artificial Sequence
  Synthetic
ucacacaacuguaaggcca

SEQ ID NO: 1508 - RNA, 19 nt, Artificial Sequence
  Synthetic
gggaagauuugaagacuua

SEQ ID NO: 1509 - RNA, 19 nt, Artificial Sequence
  Synthetic
gcaccauguuugaaggaua

SEQ ID NO: 1510 - RNA, 19 nt, Artificial Sequence
  Synthetic
gagcaggagaggaaagaua

SEQ ID NO: 1511 - RNA, 19 nt, Artificial Sequence
  Synthetic
cauauuugcucuagaagaa

SEQ ID NO: 1512 - RNA, 19 nt, Artificial Sequence
  Synthetic
gcggaaagcugugaagaua

SEQ ID NO: 1513 - RNA, 19 nt, Artificial Sequence
  Synthetic
ucacaagagucaacauuaa

SEQ ID NO: 1514 - RNA, 19 nt, Artificial Sequence
  Synthetic
cagcaugaguacaagaaau

SEQ ID NO: 1515 - RNA, 19 nt, Artificial Sequence
  Synthetic
gcuaagaaguuuggaauca

SEQ ID NO: 1516 - RNA, 19 nt, Artificial Sequence
  Synthetic
gggacgagcaagugcagaa

SEQ ID NO: 1517 - RNA, 19 nt, Artificial Sequence
  Synthetic
cagacuugguacugaggaa

SEQ ID NO: 1518 - RNA, 19 nt, Artificial Sequence
  Synthetic
caaaguuggaugaagcuaa

SEQ ID NO: 1519 - RNA, 19 nt, Artificial Sequence
  Synthetic
ggaauugcauccaagguau

SEQ ID NO: 1520 - RNA, 19 nt, Artificial Sequence
  Synthetic
uacaagaaauggcaggaaa

SEQ ID NO: 1521 - RNA, 19 nt, Artificial Sequence
  Synthetic
caaaaggacagaagagcaa

SEQ ID NO: 1522 - RNA, 19 nt, Artificial Sequence
  Synthetic
acaagaaauggcaggaaaa

SEQ ID NO: 1523 - RNA, 19 nt, Artificial Sequence
  Synthetic
gaaaaugagaugaaggaga

SEQ ID NO: 1524 - RNA, 19 nt, Artificial Sequence
  Synthetic
cagaagagcaacugagauc

SEQ ID NO: 1525 - RNA, 19 nt, Artificial Sequence
  Synthetic
gcacaauggcugaacaagu

SEQ ID NO: 1526 - RNA, 19 nt, Artificial Sequence
  Synthetic
gcucaaggaaacagacaca

SEQ ID NO: 1527 - RNA, 19 nt, Artificial Sequence
  Synthetic
aaaaugagaugaaggagaa

SEQ ID NO: 1528 - RNA, 19 nt, Artificial Sequence
  Synthetic
caauaggaaggcuaaauaa

SEQ ID NO: 1529 - RNA, 19 nt, Artificial Sequence
  Synthetic
caacucacuggaagaaaua

SEQ ID NO: 1530 - RNA, 19 nt, Artificial Sequence
  Synthetic
ccaguaaccaugaguauga

SEQ ID NO: 1531 - RNA, 19 nt, Artificial Sequence
  Synthetic
uuugaaaguggguggaauu

SEQ ID NO: 1532 - RNA, 19 nt, Artificial Sequence
  Synthetic
gaauugcauccaagguaua

SEQ ID NO: 1533 - RNA, 19 nt, Artificial Sequence
  Synthetic
aguacuuaauggugauaga

SEQ ID NO: 1534 - RNA, 19 nt, Artificial Sequence
  Synthetic
aggcuuuguauuugagcaa

SEQ ID NO: 1535 - RNA, 19 nt, Artificial Sequence
  Synthetic
aaacgaacggugacggcaa

SEQ ID NO: 1536 - RNA, 19 nt, Artificial Sequence
  Synthetic
agagauuucaugaggccaa

SEQ ID NO: 1537 - RNA, 19 nt, Artificial Sequence
  Synthetic
ucauugaagcucagaauca

SEQ ID NO: 1538 - RNA, 19 nt, Artificial Sequence
  Synthetic
gggagaaacuuuaggauau

SEQ ID NO: 1539 - RNA, 19 nt, Artificial Sequence
  Synthetic
gguaauagccaaaggagau

SEQ ID NO: 1540 - RNA, 19 nt, Artificial Sequence
  Synthetic
ggagcuagguaaugaggaa

SEQ ID NO: 1541 - RNA, 19 nt, Artificial Sequence
  Synthetic
gcaugcaucuuuugagaaa

SEQ ID NO: 1542 - RNA, 19 nt, Artificial Sequence
  Synthetic
gguuguagaaggugauuua

SEQ ID NO: 1543 - RNA, 19 nt, Artificial Sequence
  Synthetic
uguaaugacccuaaaguua

SEQ ID NO: 1544 - RNA, 19 nt, Artificial Sequence
  Synthetic
ggagaaacuuuaggauaua

SEQ ID NO: 1545 - RNA, 19 nt, Artificial Sequence
  Synthetic
cagcagauauugaagauuu

SEQ ID NO: 1546 - RNA, 19 nt, Artificial Sequence
  Synthetic
gaagaagaaucuccaauua

SEQ ID NO: 1547 - RNA, 19 nt, Artificial Sequence
  Synthetic
gaauuuaucuccaguguuu

SEQ ID NO: 1548 - RNA, 19 nt, Artificial Sequence
  Synthetic
ggaaguaguccuuugauau

SEQ ID NO: 1549 - RNA, 19 nt, Artificial Sequence
  Synthetic
acagagaacuuuuguugaa

SEQ ID NO: 1550 - RNA, 19 nt, Artificial Sequence
  Synthetic
cguuauaucuccugccuau

SEQ ID NO: 1551 - RNA, 19 nt, Artificial Sequence
  Synthetic
ucaaacagcagaagaccaa

SEQ ID NO: 1552 - RNA, 19 nt, Artificial Sequence
  Synthetic
ggaagaugaggaugaugaa

SEQ ID NO: 1553 - RNA, 19 nt, Artificial Sequence
  Synthetic
cagagauggucuuggagaa

SEQ ID NO: 1554 - RNA, 19 nt, Artificial Sequence
  Synthetic
gaaggcaucuaaagagaaa

SEQ ID NO: 1555 - RNA, 19 nt, Artificial Sequence
  Synthetic
aggcacaacugguuugaua

SEQ ID NO: 1556 - RNA, 19 nt, Artificial Sequence
  Synthetic
ccucaagaaugguaauuau

SEQ ID NO: 1557 - RNA, 19 nt, Artificial Sequence
  Synthetic
acuacaagaugaaagacaa

SEQ ID NO: 1558 - RNA, 19 nt, Artificial Sequence
  Synthetic
gcagucaugugcugaguua

SEQ ID NO: 1559 - RNA, 19 nt, Artificial Sequence
  Synthetic
uaugaagaguggagaaguu

SEQ ID NO: 1560 - RNA, 19 nt, Artificial Sequence
  Synthetic
acauggaacucuucaacaa

SEQ ID NO: 1561 - RNA, 19 nt, Artificial Sequence
  Synthetic
ucuacaagguuaucaggaa

SEQ ID NO: 1562 - RNA, 19 nt, Artificial Sequence
  Synthetic
uccuagagauggaguagaa

SEQ ID NO: 1563 - RNA, 19 nt, Artificial Sequence
  Synthetic
guuaauggcuucuguuaca

SEQ ID NO: 1564 - RNA, 19 nt, Artificial Sequence
  Synthetic
ggauugugcuguaauaaga

SEQ ID NO: 1565 - RNA, 19 nt, Artificial Sequence
  Synthetic
ccuguuugcugaagugauu

SEQ ID NO: 1566 - RNA, 19 nt, Artificial Sequence
  Synthetic
gcucaguucaguaccauaa

SEQ ID NO: 1567 - RNA, 19 nt, Artificial Sequence
  Synthetic
gugaauguauguacuguau

SEQ ID NO: 1568 - RNA, 19 nt, Artificial Sequence
  Synthetic
gcuauaagaucgaaguuug

SEQ ID NO: 1569 - RNA, 19 nt, Artificial Sequence
  Synthetic
gagguaaucagauggucua

SEQ ID NO: 1570 - RNA, 19 nt, Artificial Sequence
  Synthetic
gaaauauucauccagguua

SEQ ID NO: 1571 - RNA, 19 nt, Artificial Sequence
  Synthetic
gaucuuaggguuagaauac

SEQ ID NO: 1572 - RNA, 19 nt, Artificial Sequence
  Synthetic
aggccaaacugcuauaaga

SEQ ID NO: 1573 - RNA, 19 nt, Artificial Sequence
  Synthetic
aaagagaugcugggacaua

SEQ ID NO: 1574 - RNA, 19 nt, Artificial Sequence
  Synthetic
caagucaggugguggucau

SEQ ID NO: 1575 - RNA, 19 nt, Artificial Sequence
  Synthetic
gaucaaagcagacucauca

SEQ ID NO: 1576 - RNA, 19 nt, Artificial Sequence
  Synthetic
gcaagaguguucagcaaac

SEQ ID NO: 1577 - RNA, 19 nt, Artificial Sequence
  Synthetic
gcucagaccugcaagagaa

SEQ ID NO: 1578 - RNA, 19 nt, Artificial Sequence
  Synthetic
gggaggaggacaucgguaa

SEQ ID NO: 1579 - RNA, 19 nt, Artificial Sequence
  Synthetic
cggcagugaagcagacaua

SEQ ID NO: 1580 - RNA, 19 nt, Artificial Sequence
  Synthetic
ggucaaggcuguuacccua

SEQ ID NO: 1581 - RNA, 19 nt, Artificial Sequence
  Synthetic
cagcagaacugguagccuu

SEQ ID NO: 1582 - RNA, 19 nt, Artificial Sequence
  Synthetic
uuucagaaguacagggcau

SEQ ID NO: 1583 - RNA, 19 nt, Artificial Sequence
  Synthetic
ccuucuaccuuguuugaaa

SEQ ID NO: 1584 - RNA, 19 nt, Artificial Sequence
  Synthetic
ccuuauaccuuuagcaucu

SEQ ID NO: 1585 - RNA, 19 nt, Artificial Sequence
  Synthetic
ggaggaggacaucgguaaa

SEQ ID NO: 1586 - RNA, 19 nt, Artificial Sequence
  Synthetic
ggaaaucagcccauggaga

SEQ ID NO: 1587 - RNA, 19 nt, Artificial Sequence
  Synthetic
ccauugacuuugagaagga

SEQ ID NO: 1588 - RNA, 19 nt, Artificial Sequence
  Synthetic
gagaaaucaucguuacaga

SEQ ID NO: 1589 - RNA, 19 nt, Artificial Sequence
  Synthetic
gcuaugguuucuaugguua

SEQ ID NO: 1590 - RNA, 19 nt, Artificial Sequence
  Synthetic
agucaaaucugaaucgaca

SEQ ID NO: 1591 - RNA, 19 nt, Artificial Sequence
  Synthetic
ucaaaguaccuaagaagau

SEQ ID NO: 1592 - RNA, 19 nt, Artificial Sequence
  Synthetic
agaaggaugaugacagcaa

SEQ ID NO: 1593 - RNA, 19 nt, Artificial Sequence
  Synthetic
cagacaagcucccuggauu

SEQ ID NO: 1594 - RNA, 19 nt, Artificial Sequence
  Synthetic
gaaaugauccucacagauu

SEQ ID NO: 1595 - RNA, 19 nt, Artificial Sequence
  Synthetic
gcguggagaucgcuaagaa

SEQ ID NO: 1596 - RNA, 19 nt, Artificial Sequence
  Synthetic
ucaaacaguuccucgacua

SEQ ID NO: 1597 - RNA, 19 nt, Artificial Sequence
  Synthetic
ccugaauccuaauaaagaa

SEQ ID NO: 1598 - RNA, 19 nt, Artificial Sequence
  Synthetic
ggucaaaguaccuaagaag

SEQ ID NO: 1599 - RNA, 19 nt, Artificial Sequence
  Synthetic
ugcaagagaagcugggcaa

SEQ ID NO: 1600 - RNA, 19 nt, Artificial Sequence
  Synthetic
uggccaaugcccuggacaa

SEQ ID NO: 1601 - RNA, 19 nt, Artificial Sequence
  Synthetic
cagaaaaugucaaccagua

SEQ ID NO: 1602 - RNA, 19 nt, Artificial Sequence
  Synthetic
gggaugaguuugaaggccu

SEQ ID NO: 1603 - RNA, 19 nt, Artificial Sequence
  Synthetic
gggaugucacgaaguuaaa

SEQ ID NO: 1604 - RNA, 19 nt, Artificial Sequence
  Synthetic
cggcgaggaugucgagguu

SEQ ID NO: 1605 - RNA, 19 nt, Artificial Sequence
  Synthetic
gaguggacauugugggauc

SEQ ID NO: 1606 - RNA, 19 nt, Artificial Sequence
  Synthetic
gaaaucagcccauggagau

SEQ ID NO: 1607 - RNA, 19 nt, Artificial Sequence
  Synthetic
agagagagauuaugagcaa

SEQ ID NO: 1608 - RNA, 19 nt, Artificial Sequence
  Synthetic
gcgaggagccggagaagaa

SEQ ID NO: 1609 - RNA, 19 nt, Artificial Sequence
  Synthetic
gccuaaagauauuggaaga

SEQ ID NO: 1610 - RNA, 19 nt, Artificial Sequence
  Synthetic
aaugauaccuggagagaga

SEQ ID NO: 1611 - RNA, 19 nt, Artificial Sequence
  Synthetic
cauuugaagcagaaagaaa

SEQ ID NO: 1612 - RNA, 19 nt, Artificial Sequence
  Synthetic
cagaagguuuuaaaggaaa

SEQ ID NO: 1613 - RNA, 19 nt, Artificial Sequence
  Synthetic
acagaagguuuuaaaggaa

SEQ ID NO: 1614 - RNA, 19 nt, Artificial Sequence
  Synthetic
cauuggagcuggcggcuua

SEQ ID NO: 1615 - RNA, 19 nt, Artificial Sequence
  Synthetic
ugaaguugcugcagaauuu

SEQ ID NO: 1616 - RNA, 19 nt, Artificial Sequence
  Synthetic
uacaggagguuuuggauua

SEQ ID NO: 1617 - RNA, 19 nt, Artificial Sequence
  Synthetic
gcuaagaaguugaaucgau

SEQ ID NO: 1618 - RNA, 19 nt, Artificial Sequence
  Synthetic
ggagcagccuuuuggagaa

SEQ ID NO: 1619 - RNA, 19 nt, Artificial Sequence
  Synthetic
gcugaauaccugugcauga

SEQ ID NO: 1620 - RNA, 19 nt, Artificial Sequence
  Synthetic
aagcagaaagaaaggaaaa

SEQ ID NO: 1621 - RNA, 19 nt, Artificial Sequence
  Synthetic
gaagcagaaagaaaggaaa

SEQ ID NO: 1622 - RNA, 19 nt, Artificial Sequence
  Synthetic
gcugauaucucuucuaaau

SEQ ID NO: 1623 - RNA, 19 nt, Artificial Sequence
  Synthetic
caauagugcuucucugcaa

SEQ ID NO: 1624 - RNA, 19 nt, Artificial Sequence
  Synthetic
agagagagcaucacaauau

SEQ ID NO: 1625 - RNA, 19 nt, Artificial Sequence
  Synthetic
gguguuacguauaggcuca

SEQ ID NO: 1626 - RNA, 19 nt, Artificial Sequence
  Synthetic
agaugauccugaacauaua

SEQ ID NO: 1627 - RNA, 19 nt, Artificial Sequence
  Synthetic
cagcuaaacuacaggaggu

SEQ ID NO: 1628 - RNA, 19 nt, Artificial Sequence
  Synthetic
gaagauggauaaauggcau

SEQ ID NO: 1629 - RNA, 19 nt, Artificial Sequence
  Synthetic
ggcugaaguugcugcagaa

SEQ ID NO: 1630 - RNA, 19 nt, Artificial Sequence
  Synthetic
gguaaccucuauugaagaa

SEQ ID NO: 1631 - RNA, 19 nt, Artificial Sequence
  Synthetic
ggaaccauguaaagaaguu

SEQ ID NO: 1632 - RNA, 19 nt, Artificial Sequence
  Synthetic
agaacacuguauugaguau

SEQ ID NO: 1633 - RNA, 19 nt, Artificial Sequence
  Synthetic
gcuggaaccauguaaagaa

SEQ ID NO: 1634 - RNA, 19 nt, Artificial Sequence
  Synthetic
gagaugauccugaacauau

SEQ ID NO: 1635 - RNA, 19 nt, Artificial Sequence
  Synthetic
gaagaaaagaaggagaaua

SEQ ID NO: 1636 - RNA, 19 nt, Artificial Sequence
  Synthetic
gaagaacgaacaaggccaa

SEQ ID NO: 1637 - RNA, 19 nt, Artificial Sequence
  Synthetic
ggacaaacauggauggaau

SEQ ID NO: 1638 - RNA, 19 nt, Artificial Sequence
  Synthetic
ggaagcagcaggaggaaua

SEQ ID NO: 1639 - RNA, 19 nt, Artificial Sequence
  Synthetic
gcuuauaauuccuggagaa

SEQ ID NO: 1640 - RNA, 19 nt, Artificial Sequence
  Synthetic
aauaaguaaugguggguua

SEQ ID NO: 1641 - RNA, 19 nt, Artificial Sequence
  Synthetic
acaagaagaggaagagaua

SEQ ID NO: 1642 - RNA, 19 nt, Artificial Sequence
  Synthetic
gguuauacaagaagaggaa

SEQ ID NO: 1643 - RNA, 19 nt, Artificial Sequence
  Synthetic
aagaagaggaagagauaau

SEQ ID NO: 1644 - RNA, 19 nt, Artificial Sequence
  Synthetic
uggaagaccucauggccaa

SEQ ID NO: 1645 - RNA, 19 nt, Artificial Sequence
  Synthetic
aggaaaaccuguugaucua

SEQ ID NO: 1646 - RNA, 19 nt, Artificial Sequence
  Synthetic
gcucgaaugacaauaaaua

SEQ ID NO: 1647 - RNA, 19 nt, Artificial Sequence
  Synthetic
gaacuagccaauaugaaua

SEQ ID NO: 1648 - RNA, 19 nt, Artificial Sequence
  Synthetic
gggaauuguaagcgacuau

SEQ ID NO: 1649 - RNA, 19 nt, Artificial Sequence
  Synthetic
aaguaaaguucaagcagca

SEQ ID NO: 1650 - RNA, 19 nt, Artificial Sequence
  Synthetic
acaagagguuauacaagaa

SEQ ID NO: 1651 - RNA, 19 nt, Artificial Sequence
  Synthetic
cugcaaagcuggaggagca

SEQ ID NO: 1652 - RNA, 19 nt, Artificial Sequence
  Synthetic
aggaagagccacuggaaga

SEQ ID NO: 1653 - RNA, 19 nt, Artificial Sequence
  Synthetic
aggaagugcugaaggcaau

SEQ ID NO: 1654 - RNA, 19 nt, Artificial Sequence
  Synthetic
cagcacggguugaggguga

SEQ ID NO: 1655 - RNA, 19 nt, Artificial Sequence
  Synthetic
cuucgaagcuacuggauga

SEQ ID NO: 1656 - RNA, 19 nt, Artificial Sequence
  Synthetic
uggaagagccacuggauga

SEQ ID NO: 1657 - RNA, 19 nt, Artificial Sequence
  Synthetic
ggacagaggaagagccacu

SEQ ID NO: 1658 - RNA, 19 nt, Artificial Sequence
  Synthetic
ccacagaacuggcaagacu

SEQ ID NO: 1659 - RNA, 19 nt, Artificial Sequence
  Synthetic
cccaagacugugagacaua

SEQ ID NO: 1660 - RNA, 19 nt, Artificial Sequence
  Synthetic
caggaagugcugaaggcaa

SEQ ID NO: 1661 - RNA, 19 nt, Artificial Sequence
  Synthetic
gggccugaacccagacuua

SEQ ID NO: 1662 - RNA, 19 nt, Artificial Sequence
  Synthetic
uaauaaagugcuugaggau

SEQ ID NO: 1663 - RNA, 19 nt, Artificial Sequence
  Synthetic
ucucgggaauugagggaau

SEQ ID NO: 1664 - RNA, 19 nt, Artificial Sequence
  Synthetic
gacccaagacugugagaca

SEQ ID NO: 1665 - RNA, 19 nt, Artificial Sequence
  Synthetic
caucuuugcuaguaaucua

SEQ ID NO: 1666 - RNA, 19 nt, Artificial Sequence
  Synthetic
ugucauaagcauggaguuu

SEQ ID NO: 1667 - RNA, 19 nt, Artificial Sequence
  Synthetic
gggcagugcuacaguauuc

SEQ ID NO: 1668 - RNA, 19 nt, Artificial Sequence
  Synthetic
agcagaaggaacugaacaa

SEQ ID NO: 1669 - RNA, 19 nt, Artificial Sequence
  Synthetic
gggcuaucacugaagucaa

SEQ ID NO: 1670 - RNA, 19 nt, Artificial Sequence
  Synthetic
ugaacaaagcccuggaagu

SEQ ID NO: 1671 - RNA, 19 nt, Artificial Sequence
  Synthetic
cuaauaaagugcuugagga

SEQ ID NO: 1672 - RNA, 19 nt, Artificial Sequence
  Synthetic
gcaggugucuugagcccua

SEQ ID NO: 1673 - RNA, 19 nt, Artificial Sequence
  Synthetic
gaauugagggaaugguuga

SEQ ID NO: 1674 - RNA, 19 nt, Artificial Sequence
  Synthetic
ccuggagauuggagacaca

SEQ ID NO: 1675 - RNA, 19 nt, Artificial Sequence
  Synthetic
gcgaauugugggccagauu

SEQ ID NO: 1676 - RNA, 19 nt, Artificial Sequence
  Synthetic
cuacaguauucaugccaca

SEQ ID NO: 1677 - RNA, 19 nt, Artificial Sequence
  Synthetic
auggagacuuggugacuuu

SEQ ID NO: 1678 - RNA, 19 nt, Artificial Sequence
  Synthetic
ccauguggacuuuguggua

SEQ ID NO: 1679 - RNA, 19 nt, Artificial Sequence
  Synthetic
cacaguaggcacucaauaa

SEQ ID NO: 1680 - RNA, 19 nt, Artificial Sequence
  Synthetic
augccaaguuucagaauua

SEQ ID NO: 1681 - RNA, 19 nt, Artificial Sequence
  Synthetic
cuaaaggaguacagcaauu

SEQ ID NO: 1682 - RNA, 19 nt, Artificial Sequence
  Synthetic
ggaauauggccuacagaga

SEQ ID NO: 1683 - RNA, 19 nt, Artificial Sequence
  Synthetic
gcagaggaauggaaacaau

SEQ ID NO: 1684 - RNA, 19 nt, Artificial Sequence
  Synthetic
gaacaaacgggaauaugaa

SEQ ID NO: 1685 - RNA, 19 nt, Artificial Sequence
  Synthetic
ggaagggagcauagcauau

SEQ ID NO: 1686 - RNA, 19 nt, Artificial Sequence
  Synthetic
gcaagaaggagaaaguuga

SEQ ID NO: 1687 - RNA, 19 nt, Artificial Sequence
  Synthetic
guugaaggacucagcuaaa

SEQ ID NO: 1688 - RNA, 19 nt, Artificial Sequence
  Synthetic
caggagaacaaacgggaau

SEQ ID NO: 1689 - RNA, 19 nt, Artificial Sequence
  Synthetic
gagcagaggaauggaaaca

SEQ ID NO: 1690 - RNA, 19 nt, Artificial Sequence
  Synthetic
cuaugcagaugguaguaua

SEQ ID NO: 1691 - RNA, 19 nt, Artificial Sequence
  Synthetic
gggagcagaggaauggaaa

SEQ ID NO: 1692 - RNA, 19 nt, Artificial Sequence
  Synthetic
aauauggccuacagagaau

SEQ ID NO: 1693 - RNA, 19 nt, Artificial Sequence
  Synthetic
aaugauugcugaaguguuu

SEQ ID NO: 1694 - RNA, 19 nt, Artificial Sequence
  Synthetic
acaaguaacccauguaaaa

SEQ ID NO: 1695 - RNA, 19 nt, Artificial Sequence
  Synthetic
gaauauggccuacagagaa

SEQ ID NO: 1696 - RNA, 19 nt, Artificial Sequence
  Synthetic
cagcaauuguaguaacuga

SEQ ID NO: 1697 - RNA, 19 nt, Artificial Sequence
  Synthetic
gugaauguguuuggaauau

SEQ ID NO: 1698 - RNA, 19 nt, Artificial Sequence
  Synthetic
gcauaucuguggcaaacua

SEQ ID NO: 1699 - RNA, 19 nt, Artificial Sequence
  Synthetic
ggauggaacauuuaaacuu

SEQ ID NO: 1700 - RNA, 19 nt, Artificial Sequence
  Synthetic
gagaauagaaacaaaucca

SEQ ID NO: 1701 - RNA, 19 nt, Artificial Sequence
  Synthetic
aauaaaccaccuacaguua

SEQ ID NO: 1702 - RNA, 19 nt, Artificial Sequence
  Synthetic
agaacaaacgggaauauga

SEQ ID NO: 1703 - RNA, 19 nt, Artificial Sequence
  Synthetic
agcuguaccaggagaacaa

SEQ ID NO: 1704 - RNA, 19 nt, Artificial Sequence
  Synthetic
acucaauuguccaucuuua

SEQ ID NO: 1705 - RNA, 19 nt, Artificial Sequence
  Synthetic
aguuauugcugcaugcuuu

SEQ ID NO: 1706 - RNA, 19 nt, Artificial Sequence
  Synthetic
gcacaaguaacccauguaa

SEQ ID NO: 1707 - RNA, 19 nt, Artificial Sequence
  Synthetic
caagaaggagaaaguugaa

SEQ ID NO: 1708 - RNA, 19 nt, Artificial Sequence
  Synthetic
ucacugaagaauauccaaa

SEQ ID NO: 1709 - RNA, 19 nt, Artificial Sequence
  Synthetic
gauacuaagaucucaguca

SEQ ID NO: 1710 - RNA, 19 nt, Artificial Sequence
  Synthetic
gaacaaagcuggaaugauu

SEQ ID NO: 1711 - RNA, 19 nt, Artificial Sequence
  Synthetic
auacauaacuucagugcaa

SEQ ID NO: 1712 - RNA, 19 nt, Artificial Sequence
  Synthetic
caaacgagaauaugagaaa

SEQ ID NO: 1713 - RNA, 19 nt, Artificial Sequence
  Synthetic
aggcugagguggcagaaua

SEQ ID NO: 1714 - RNA, 19 nt, Artificial Sequence
  Synthetic
ggagggaaaucuuggugua

SEQ ID NO: 1715 - RNA, 19 nt, Artificial Sequence
  Synthetic
caagagacuuugucacuua

SEQ ID NO: 1716 - RNA, 19 nt, Artificial Sequence
  Synthetic
ggaaaacaaacgagaauau

SEQ ID NO: 1717 - RNA, 19 nt, Artificial Sequence
  Synthetic
caucuuaguuuacuggaua

SEQ ID NO: 1718 - RNA, 19 nt, Artificial Sequence
  Synthetic
ggcaaaggcgggaggauca

SEQ ID NO: 1719 - RNA, 19 nt, Artificial Sequence
  Synthetic
gcuuguguaucuugauuaa

SEQ ID NO: 1720 - RNA, 19 nt, Artificial Sequence
  Synthetic
agacauaacugguuugacu

SEQ ID NO: 1721 - RNA, 19 nt, Artificial Sequence
  Synthetic
gguagcauauguuuagaua

SEQ ID NO: 1722 - RNA, 19 nt, Artificial Sequence
  Synthetic
aguuauauuuggaccagaa

SEQ ID NO: 1723 - RNA, 19 nt, Artificial Sequence
  Synthetic
gcacagcuuuaucaggaaa

SEQ ID NO: 1724 - RNA, 19 nt, Artificial Sequence
  Synthetic
gcaguggaaugcaguuaua

SEQ ID NO: 1725 - RNA, 19 nt, Artificial Sequence
  Synthetic
guauuuaggccauuuguua

SEQ ID NO: 1726 - RNA, 19 nt, Artificial Sequence
  Synthetic
caggaaaacaaacgagaau

SEQ ID NO: 1727 - RNA, 19 nt, Artificial Sequence
  Synthetic
acacagagaacacaaauuu

SEQ ID NO: 1728 - RNA, 19 nt, Artificial Sequence
  Synthetic
acaacaucaugcaguggaa

SEQ ID NO: 1729 - RNA, 19 nt, Artificial Sequence
  Synthetic
gcacauauuggagggaaau

SEQ ID NO: 1730 - RNA, 19 nt, Artificial Sequence
  Synthetic
guuuagauauccuucagaa

SEQ ID NO: 1731 - RNA, 19 nt, Artificial Sequence
  Synthetic
uauccuaugccuucaaaua

SEQ ID NO: 1732 - RNA, 19 nt, Artificial Sequence
  Synthetic
gagggaaaucuugguguaa

SEQ ID NO: 1733 - RNA, 19 nt, Artificial Sequence
  Synthetic
gaguaauucuagacauaac

SEQ ID NO: 1734 - RNA, 19 nt, Artificial Sequence
  Synthetic
gagcugugauuaugccauu

SEQ ID NO: 1735 - RNA, 19 nt, Artificial Sequence
  Synthetic
gcacuugccuguagucuca

SEQ ID NO: 1736 - RNA, 19 nt, Artificial Sequence
  Synthetic
gggagacgggauaguguuu

SEQ ID NO: 1737 - RNA, 19 nt, Artificial Sequence
  Synthetic
acuaaguuauugcugcaua

SEQ ID NO: 1738 - RNA, 19 nt, Artificial Sequence
  Synthetic
acaaacgagaauaugagaa

SEQ ID NO: 1739 - RNA, 19 nt, Artificial Sequence
  Synthetic
agcaauacccugucuuuaa

SEQ ID NO: 1740 - RNA, 19 nt, Artificial Sequence
  Synthetic
gguauaagcucucgcuaga

SEQ ID NO: 1741 - RNA, 19 nt, Artificial Sequence
  Synthetic
aagaaguaccugcaagaaa

SEQ ID NO: 1742 - RNA, 19 nt, Artificial Sequence
  Synthetic
cgguugagcccuuguauau

SEQ ID NO: 1743 - RNA, 19 nt, Artificial Sequence
  Synthetic
ccacagcuuuuaagaagua

SEQ ID NO: 1744 - RNA, 19 nt, Artificial Sequence
  Synthetic
ccauggagcagcuggaaca

SEQ ID NO: 1745 - RNA, 19 nt, Artificial Sequence
  Synthetic
ggagaacccaacauugaua

SEQ ID NO: 1746 - RNA, 19 nt, Artificial Sequence
  Synthetic
guauaggacucuuuaucuu

SEQ ID NO: 1747 - RNA, 19 nt, Artificial Sequence
  Synthetic
cuggaacaguauaugaaga

SEQ ID NO: 1748 - RNA, 19 nt, Artificial Sequence
  Synthetic
uggagcagcuggaacagua

SEQ ID NO: 1749 - RNA, 19 nt, Artificial Sequence
  Synthetic
uaaauuaagccucgguuga

SEQ ID NO: 1750 - RNA, 19 nt, Artificial Sequence
  Synthetic
agaaguaccugcaagaaac

SEQ ID NO: 1751 - RNA, 19 nt, Artificial Sequence
  Synthetic
uuaagaaguaccugcaaga

SEQ ID NO: 1752 - RNA, 19 nt, Artificial Sequence
  Synthetic
uaucuugagcugugguauu

SEQ ID NO: 1753 - RNA, 19 nt, Artificial Sequence
  Synthetic
guugagcccuuguauauua

SEQ ID NO: 1754 - RNA, 19 nt, Artificial Sequence
  Synthetic
ugcaagaaaccuacucaaa

SEQ ID NO: 1755 - RNA, 19 nt, Artificial Sequence
  Synthetic
cagacaaccuuuucaaaug

SEQ ID NO: 1756 - RNA, 19 nt, Artificial Sequence
  Synthetic
uaggagaacccaacauuga

SEQ ID NO: 1757 - RNA, 19 nt, Artificial Sequence
  Synthetic
caagaaaccuacucaaagc

SEQ ID NO: 1758 - RNA, 19 nt, Artificial Sequence
  Synthetic
cagcuggaacaguauauga

SEQ ID NO: 1759 - RNA, 19 nt, Artificial Sequence
  Synthetic
gcaagaaaccuacucaaag

SEQ ID NO: 1760 - RNA, 19 nt, Artificial Sequence
  Synthetic
gagcagcuggaacaguaua

SEQ ID NO: 1761 - RNA, 19 nt, Artificial Sequence
  Synthetic
gagcccuuguauauuaaau

SEQ ID NO: 1762 - RNA, 19 nt, Artificial Sequence
  Synthetic
cgagcgaguuccugucucu

SEQ ID NO: 1763 - RNA, 19 nt, Artificial Sequence
  Synthetic
ggaccauucugcucuccau

SEQ ID NO: 1764 - RNA, 19 nt, Artificial Sequence
  Synthetic
ggucugcccuguaugaugu

SEQ ID NO: 1765 - RNA, 19 nt, Artificial Sequence
  Synthetic
uacaaugcgcccacaguga

SEQ ID NO: 1766 - RNA, 19 nt, Artificial Sequence
  Synthetic
ucuaggagaacccaacauu

SEQ ID NO: 1767 - RNA, 19 nt, Artificial Sequence
  Synthetic
uaacauaugccuggacauc

SEQ ID NO: 1768 - RNA, 19 nt, Artificial Sequence
  Synthetic
acaaugcgcccacagugaa

SEQ ID NO: 1769 - RNA, 19 nt, Artificial Sequence
  Synthetic
gguugagcccuuguauauu

SEQ ID NO: 1770 - RNA, 19 nt, Artificial Sequence
  Synthetic
gagaauggacucagaaaua

SEQ ID NO: 1771 - RNA, 19 nt, Artificial Sequence
  Synthetic
caacagacaugcaagagaa

SEQ ID NO: 1772 - RNA, 19 nt, Artificial Sequence
  Synthetic
gcauugagaaagacauuua

SEQ ID NO: 1773 - RNA, 19 nt, Artificial Sequence
  Synthetic
cagaaagaauugagugauc

SEQ ID NO: 1774 - RNA, 19 nt, Artificial Sequence
  Synthetic
ggaaguauuugucucgaua

SEQ ID NO: 1775 - RNA, 19 nt, Artificial Sequence
  Synthetic
gaaagaauugagugaucua

SEQ ID NO: 1776 - RNA, 19 nt, Artificial Sequence
  Synthetic
uuguaugcauugagaaaga

SEQ ID NO: 1777 - RNA, 19 nt, Artificial Sequence
  Synthetic
ccaugaaaccauuugauuu

SEQ ID NO: 1778 - RNA, 19 nt, Artificial Sequence
  Synthetic
cagcuggaccugugggaga

SEQ ID NO: 1779 - RNA, 19 nt, Artificial Sequence
  Synthetic
cauaaacaguaauggaagu

SEQ ID NO: 1780 - RNA, 19 nt, Artificial Sequence
  Synthetic
aggaagauguguaacuuuu

SEQ ID NO: 1781 - RNA, 19 nt, Artificial Sequence
  Synthetic
cuaaguaggaagaugugua

SEQ ID NO: 1782 - RNA, 19 nt, Artificial Sequence
  Synthetic
ugaauuaauugcacugcua

SEQ ID NO: 1783 - RNA, 19 nt, Artificial Sequence
  Synthetic
aggauauucuguagauuga

SEQ ID NO: 1784 - RNA, 19 nt, Artificial Sequence
  Synthetic
guagauugauugcagauuu

SEQ ID NO: 1785 - RNA, 19 nt, Artificial Sequence
  Synthetic
cugaaaagcaaccaaauua

SEQ ID NO: 1786 - RNA, 19 nt, Artificial Sequence
  Synthetic
aagagaauggacucagaaa

SEQ ID NO: 1787 - RNA, 19 nt, Artificial Sequence
  Synthetic
gcaagagaauggacucaga

SEQ ID NO: 1788 - RNA, 19 nt, Artificial Sequence
  Synthetic
gcacaaaucuauaaaucag

SEQ ID NO: 1789 - RNA, 19 nt, Artificial Sequence
  Synthetic
cauccaaacauaaacagua

SEQ ID NO: 1790 - RNA, 19 nt, Artificial Sequence
  Synthetic
agagaauggacucagaaau

SEQ ID NO: 1791 - RNA, 19 nt, Artificial Sequence
  Synthetic
aguaccagauauugcacaa

SEQ ID NO: 1792 - RNA, 19 nt, Artificial Sequence
  Synthetic
ccauggcgcugaagaggau

SEQ ID NO: 1793 - RNA, 19 nt, Artificial Sequence
  Synthetic
ggaagauguguaacuuuua

SEQ ID NO: 1794 - RNA, 19 nt, Artificial Sequence
  Synthetic
caacauuagcaguaaauug

SEQ ID NO: 1795 - RNA, 19 nt, Artificial Sequence
  Synthetic
ugucuaagaugucaguuuu

SEQ ID NO: 1796 - RNA, 19 nt, Artificial Sequence
  Synthetic
cccaacggcugauaauuaa

SEQ ID NO: 1797 - RNA, 19 nt, Artificial Sequence
  Synthetic
gaucuacaaugcagcugaa

SEQ ID NO: 1798 - RNA, 19 nt, Artificial Sequence
  Synthetic
gaaaugaucuuuacacugu

SEQ ID NO: 1799 - RNA, 19 nt, Artificial Sequence
  Synthetic
caaugcagcugaaaagcaa

SEQ ID NO: 1800 - RNA, 19 nt, Artificial Sequence
  Synthetic
uggauaaccucuacaaaua

SEQ ID NO: 1801 - RNA, 19 nt, Artificial Sequence
  Synthetic
gggaauggacucagaagua

SEQ ID NO: 1802 - RNA, 19 nt, Artificial Sequence
  Synthetic
cagcauuugucuugauauu

SEQ ID NO: 1803 - RNA, 19 nt, Artificial Sequence
  Synthetic
gagaaaaguacaacagaau

SEQ ID NO: 1804 - RNA, 19 nt, Artificial Sequence
  Synthetic
cuaucaggguggaguauuu

SEQ ID NO: 1805 - RNA, 19 nt, Artificial Sequence
  Synthetic
caacagaauagcucgggaa

SEQ ID NO: 1806 - RNA, 19 nt, Artificial Sequence
  Synthetic
agagaauccacaaggaauu

SEQ ID NO: 1807 - RNA, 19 nt, Artificial Sequence
  Synthetic
cuacaaaacagauagagaa

SEQ ID NO: 1808 - RNA, 19 nt, Artificial Sequence
  Synthetic
gaagagaauccacaaggaa

SEQ ID NO: 1809 - RNA, 19 nt, Artificial Sequence
  Synthetic
agagaaaaguacaacagaa

SEQ ID NO: 1810 - RNA, 19 nt, Artificial Sequence
  Synthetic
agaaguaugcgauguaauu

SEQ ID NO: 1811 - RNA, 19 nt, Artificial Sequence
  Synthetic
ggauaaccucuacaaauaa

SEQ ID NO: 1812 - RNA, 19 nt, Artificial Sequence
  Synthetic
aagagaauccacaaggaau

SEQ ID NO: 1813 - RNA, 19 nt, Artificial Sequence
  Synthetic
caaaacagauagagaaaag

SEQ ID NO: 1814 - RNA, 19 nt, Artificial Sequence
  Synthetic
ggaauggacucagaaguau

SEQ ID NO: 1815 - RNA, 19 nt, Artificial Sequence
  Synthetic
cuacaauaauggggccaaa

SEQ ID NO: 1816 - RNA, 19 nt, Artificial Sequence
  Synthetic
ggagaugauauguuccauu

SEQ ID NO: 1817 - RNA, 19 nt, Artificial Sequence
  Synthetic
caaaaguacucuuguccau

SEQ ID NO: 1818 - RNA, 19 nt, Artificial Sequence
  Synthetic
acaaggaauugaaugaucu

SEQ ID NO: 1819 - RNA, 19 nt, Artificial Sequence
  Synthetic
ugaagagaauccacaagga

SEQ ID NO: 1820 - RNA, 19 nt, Artificial Sequence
  Synthetic
uuggauaaccucuacaaau

SEQ ID NO: 1821 - RNA, 19 nt, Artificial Sequence
  Synthetic
cagaauagcucgggaaugg

SEQ ID NO: 1822 - RNA, 19 nt, Artificial Sequence
  Synthetic
gaaaaguacaacagaauag

SEQ ID NO: 1823 - RNA, 19 nt, Artificial Sequence
  Synthetic
gcucgggaauggacucaga

SEQ ID NO: 1824 - RNA, 19 nt, Artificial Sequence
  Synthetic
caauccagaugauccuuua

SEQ ID NO: 1825 - RNA, 19 nt, Artificial Sequence
  Synthetic
gcauuugucuugauauucu

SEQ ID NO: 1826 - RNA, 19 nt, Artificial Sequence
  Synthetic
gaaguaugcgauguaauua

SEQ ID NO: 1827 - RNA, 19 nt, Artificial Sequence
  Synthetic
cacaaggaauugaaugauc

SEQ ID NO: 1828 - RNA, 19 nt, Artificial Sequence
  Synthetic
cagcacuaacuauuucaaa

SEQ ID NO: 1829 - RNA, 19 nt, Artificial Sequence
  Synthetic
ggcagcauuugucuugaua

SEQ ID NO: 1830 - RNA, 19 nt, Artificial Sequence
  Synthetic
uggcagagcuggugugaga

SEQ ID NO: 1831 - RNA, 19 nt, Artificial Sequence
  Synthetic
gcucuaacaugcugaagaa

SEQ ID NO: 1832 - RNA, 19 nt, Artificial Sequence
  Synthetic
gagcauacaccgagagagu

SEQ ID NO: 1833 - RNA, 19 nt, Artificial Sequence
  Synthetic
gcuuggagcuauuaguuaa

SEQ ID NO: 1834 - RNA, 19 nt, Artificial Sequence
  Synthetic
ggaaauuggaagucaaaca

SEQ ID NO: 1835 - RNA, 19 nt, Artificial Sequence
  Synthetic
agagauaaguacaacagaa

SEQ ID NO: 1836 - RNA, 19 nt, Artificial Sequence
  Synthetic
gagauaaguacaacagaau

SEQ ID NO: 1837 - RNA, 19 nt, Artificial Sequence
  Synthetic
gcgcugaaacggauuaaua

SEQ ID NO: 1838 - RNA, 19 nt, Artificial Sequence
  Synthetic
gaacagaaaaugugaugua

SEQ ID NO: 1839 - RNA, 19 nt, Artificial Sequence
  Synthetic
gcauacaccgagagaguga

SEQ ID NO: 1840 - RNA, 19 nt, Artificial Sequence
  Synthetic
gugaggagccagacgacaa

SEQ ID NO: 1841 - RNA, 19 nt, Artificial Sequence
  Synthetic
aaauggagcauguguauua

SEQ ID NO: 1842 - RNA, 19 nt, Artificial Sequence
  Synthetic
ccgggauaaucaagaguuu

SEQ ID NO: 1843 - RNA, 19 nt, Artificial Sequence
  Synthetic
cugaauaaaugaugcaagu

SEQ ID NO: 1844 - RNA, 19 nt, Artificial Sequence
  Synthetic
caacagaauaucucgggaa

SEQ ID NO: 1845 - RNA, 19 nt, Artificial Sequence
  Synthetic
gaugagugaucaacuaaua

SEQ ID NO: 1846 - RNA, 19 nt, Artificial Sequence
  Synthetic
gauuugagguuacaugaua

SEQ ID NO: 1847 - RNA, 19 nt, Artificial Sequence
  Synthetic
cagcauuugucucgauauu

SEQ ID NO: 1848 - RNA, 19 nt, Artificial Sequence
  Synthetic
gagaauggaaauuggaagu

SEQ ID NO: 1849 - RNA, 19 nt, Artificial Sequence
  Synthetic
aucaaaggauacagcauua

SEQ ID NO: 1850 - RNA, 19 nt, Artificial Sequence
  Synthetic
gaaacggauuaauaaggaa

SEQ ID NO: 1851 - RNA, 19 nt, Artificial Sequence
  Synthetic
gcaaguugucaauggauga

SEQ ID NO: 1852 - RNA, 19 nt, Artificial Sequence
  Synthetic
uguuagagauuugagguua

SEQ ID NO: 1853 - RNA, 19 nt, Artificial Sequence
  Synthetic
cagacagagauaaguacaa

SEQ ID NO: 1854 - RNA, 19 nt, Artificial Sequence
  Synthetic
aaacagacagagauaagua

SEQ ID NO: 1855 - RNA, 19 nt, Artificial Sequence
  Synthetic
gguuacaugauaugcuuua

SEQ ID NO: 1856 - RNA, 19 nt, Artificial Sequence
  Synthetic
caucaaaggauacagcauu

SEQ ID NO: 1857 - RNA, 19 nt, Artificial Sequence
  Synthetic
cuaacaugcugaagaaauc

SEQ ID NO: 1858 - RNA, 19 nt, Artificial Sequence
  Synthetic
ugauauguuucauuggcaa

SEQ ID NO: 1859 - RNA, 19 nt, Artificial Sequence
  Synthetic
ccaagaagaaggagaguaa

SEQ ID NO: 1860 - RNA, 19 nt, Artificial Sequence
  Synthetic
cagcaaaccgagaaagaaa

SEQ ID NO: 1861 - RNA, 19 nt, Artificial Sequence
  Synthetic
gugaaaaccuguagugaaa

SEQ ID NO: 1862 - RNA, 19 nt, Artificial Sequence
  Synthetic
gagcagaacaugacagaau

SEQ ID NO: 1863 - RNA, 19 nt, Artificial Sequence
  Synthetic
gguucuauguuguggacua

SEQ ID NO: 1864 - RNA, 19 nt, Artificial Sequence
  Synthetic
ugucauuaguucugcaaua

SEQ ID NO: 1865 - RNA, 19 nt, Artificial Sequence
  Synthetic
cggaggagccagacacaaa

SEQ ID NO: 1866 - RNA, 19 nt, Artificial Sequence
  Synthetic
agagaugaguagugcguuu

SEQ ID NO: 1867 - RNA, 19 nt, Artificial Sequence
  Synthetic
gguaaagaguaggguauuu

SEQ ID NO: 1868 - RNA, 19 nt, Artificial Sequence
  Synthetic
gcuuggacauauugaaaga

SEQ ID NO: 1869 - RNA, 19 nt, Artificial Sequence
  Synthetic
agaaggagcuggcggacau

SEQ ID NO: 1870 - RNA, 19 nt, Artificial Sequence
  Synthetic
gacaguggaccaagagaua

SEQ ID NO: 1871 - RNA, 19 nt, Artificial Sequence
  Synthetic
ggaagggaacauugauauu

SEQ ID NO: 1872 - RNA, 19 nt, Artificial Sequence
  Synthetic
ccauauaagagaugaguag

SEQ ID NO: 1873 - RNA, 19 nt, Artificial Sequence
  Synthetic
gcuuguagucuguaaauuu

SEQ ID NO: 1874 - RNA, 19 nt, Artificial Sequence
  Synthetic
ugaaauaccuuaagcuguu

SEQ ID NO: 1875 - RNA, 19 nt, Artificial Sequence
  Synthetic
ugaaucaggacuugugaaa

SEQ ID NO: 1876 - RNA, 19 nt, Artificial Sequence
  Synthetic
ccaagagaauucagaagga

SEQ ID NO: 1877 - RNA, 19 nt, Artificial Sequence
  Synthetic
gagggugggaguugguaaa

SEQ ID NO: 1878 - RNA, 19 nt, Artificial Sequence
  Synthetic
aaaccgagaaagaaacaaa

SEQ ID NO: 1879 - RNA, 19 nt, Artificial Sequence
  Synthetic
guaaagucagcaugagcaa

SEQ ID NO: 1880 - RNA, 19 nt, Artificial Sequence
  Synthetic
gaaaaccuguagugaaaua

SEQ ID NO: 1881 - RNA, 19 nt, Artificial Sequence
  Synthetic
gagauacgcuacauaaauu

SEQ ID NO: 1882 - RNA, 19 nt, Artificial Sequence
  Synthetic
gggaguugguaaagaguag

SEQ ID NO: 1883 - RNA, 19 nt, Artificial Sequence
  Synthetic
gaagagagcugcuuaugau

SEQ ID NO: 1884 - RNA, 19 nt, Artificial Sequence
  Synthetic
gaguaggguauuucuauaa

SEQ ID NO: 1885 - RNA, 19 nt, Artificial Sequence
  Synthetic
caaccagcaaaccgagaaa

SEQ ID NO: 1886 - RNA, 19 nt, Artificial Sequence
  Synthetic
gagaguaaagucagcauga

SEQ ID NO: 1887 - RNA, 19 nt, Artificial Sequence
  Synthetic
aagaaggagaguaaaguca

SEQ ID NO: 1888 - RNA, 19 nt, Artificial Sequence
  Synthetic
caagagauacgcuacauaa

SEQ ID NO: 1889 - RNA, 19 nt, Artificial Sequence
  Synthetic
aagaacaagaggaaagaaa

SEQ ID NO: 1890 - RNA, 19 nt, Artificial Sequence
  Synthetic
auaugaaggugguguguuu

SEQ ID NO: 1891 - RNA, 19 nt, Artificial Sequence
  Synthetic
gagcagaacacgacaggau

SEQ ID NO: 1892 - RNA, 19 nt, Artificial Sequence
  Synthetic
accaagauguccagugaua

SEQ ID NO: 1893 - RNA, 19 nt, Artificial Sequence
  Synthetic
agaaggagcuagcugaaau

SEQ ID NO: 1894 - RNA, 19 nt, Artificial Sequence
  Synthetic
gguaaaugcuaucaagagu

SEQ ID NO: 1895 - RNA, 19 nt, Artificial Sequence
  Synthetic
agagauaacuucaccaaga

SEQ ID NO: 1896 - RNA, 19 nt, Artificial Sequence
  Synthetic
cugaagaacaagaggaaag

SEQ ID NO: 1897 - RNA, 19 nt, Artificial Sequence
  Synthetic
aagcauagccacucaguau

SEQ ID NO: 1898 - RNA, 19 nt, Artificial Sequence
  Synthetic
acaccaaacucucuagcaa

SEQ ID NO: 1899 - RNA, 19 nt, Artificial Sequence
  Synthetic
uguauuaaacccagaucua

SEQ ID NO: 1900 - RNA, 19 nt, Artificial Sequence
  Synthetic
gccugaagaacaagaggaa

SEQ ID NO: 1901 - RNA, 19 nt, Artificial Sequence
  Synthetic
caagagauacgcaacauaa

SEQ ID NO: 1902 - RNA, 19 nt, Artificial Sequence
  Synthetic
caauaaacaugcuccugaa

SEQ ID NO: 1903 - RNA, 19 nt, Artificial Sequence
  Synthetic
gaaggagcuagcugaaaua

SEQ ID NO: 1904 - RNA, 19 nt, Artificial Sequence
  Synthetic
gcuaucaagaguagaacuu

SEQ ID NO: 1905 - RNA, 19 nt, Artificial Sequence
  Synthetic
ggcaaagguccgaugauga

SEQ ID NO: 1906 - RNA, 19 nt, Artificial Sequence
  Synthetic
gcaaaucuuuauagccuuu

SEQ ID NO: 1907 - RNA, 19 nt, Artificial Sequence
  Synthetic
ccuaaaggagauaacauuu

SEQ ID NO: 1908 - RNA, 19 nt, Artificial Sequence
  Synthetic
cuccagagccugaagaaca

SEQ ID NO: 1909 - RNA, 19 nt, Artificial Sequence
  Synthetic
ccaagagauacgcaacaua

SEQ ID NO: 1910 - RNA, 19 nt, Artificial Sequence
  Synthetic
gccuaaaggagauaacauu

SEQ ID NO: 1911 - RNA, 19 nt, Artificial Sequence
  Synthetic
ugaaauaacccuugauccu

SEQ ID NO: 1912 - RNA, 19 nt, Artificial Sequence
  Synthetic
guaaaugcuaucaagagua

SEQ ID NO: 1913 - RNA, 19 nt, Artificial Sequence
  Synthetic
agaacaagaggaaagaaaa

SEQ ID NO: 1914 - RNA, 19 nt, Artificial Sequence
  Synthetic
caccaaacucucuagcaaa

SEQ ID NO: 1915 - RNA, 19 nt, Artificial Sequence
  Synthetic
gcagugugaaggagcagaa

SEQ ID NO: 1916 - RNA, 19 nt, Artificial Sequence
  Synthetic
acucaguauuugaccaaca

SEQ ID NO: 1917 - RNA, 19 nt, Artificial Sequence
  Synthetic
gagaagugguuuaggaaaa

SEQ ID NO: 1918 - RNA, 19 nt, Artificial Sequence
  Synthetic
ggauagaacuugagacagu

SEQ ID NO: 1919 - RNA, 19 nt, Artificial Sequence
  Synthetic
ggaaguagucuuuggcuua

SEQ ID NO: 1920 - RNA, 19 nt, Artificial Sequence
  Synthetic
gggaagauaaguaugguua

SEQ ID NO: 1921 - RNA, 19 nt, Artificial Sequence
  Synthetic
acaaagaaauugcgaugua

SEQ ID NO: 1922 - RNA, 19 nt, Artificial Sequence
  Synthetic
cuacuuaacuucuggguuu

SEQ ID NO: 1923 - RNA, 19 nt, Artificial Sequence
  Synthetic
gcacccaaauguugauaaa

SEQ ID NO: 1924 - RNA, 19 nt, Artificial Sequence
  Synthetic
ggaagauagaaauggagaa

SEQ ID NO: 1925 - RNA, 19 nt, Artificial Sequence
  Synthetic
ggguaaaugcuuugcuauu

SEQ ID NO: 1926 - RNA, 19 nt, Artificial Sequence
  Synthetic
gguguuugauugugagaau

SEQ ID NO: 1927 - RNA, 19 nt, Artificial Sequence
  Synthetic
gauuaauguuugagcuuca

SEQ ID NO: 1928 - RNA, 19 nt, Artificial Sequence
  Synthetic
guauagaucccgucacuaa

SEQ ID NO: 1929 - RNA, 19 nt, Artificial Sequence
  Synthetic
caauaaaacaugccaguua

SEQ ID NO: 1930 - RNA, 19 nt, Artificial Sequence
  Synthetic
gagaaaugcuuuggcagaa

SEQ ID NO: 1931 - RNA, 19 nt, Artificial Sequence
  Synthetic
guggaaaccaucaugauua

SEQ ID NO: 1932 - RNA, 19 nt, Artificial Sequence
  Synthetic
gaagauagaaauggagaau

SEQ ID NO: 1933 - RNA, 19 nt, Artificial Sequence
  Synthetic
ggaacugggcugcaauaaa

SEQ ID NO: 1934 - RNA, 19 nt, Artificial Sequence
  Synthetic
gcagaagagugaaagaacu

SEQ ID NO: 1935 - RNA, 19 nt, Artificial Sequence
  Synthetic
uaauguugaugcugcgaaa

SEQ ID NO: 1936 - RNA, 19 nt, Artificial Sequence
  Synthetic
ucauguacauccacaaaua

SEQ ID NO: 1937 - RNA, 19 nt, Artificial Sequence
  Synthetic
gggaagauagaaauggaga

SEQ ID NO: 1938 - RNA, 19 nt, Artificial Sequence
  Synthetic
guacauagcacaacaugau

SEQ ID NO: 1939 - RNA, 19 nt, Artificial Sequence
  Synthetic
agagacugcuuuugaguga

SEQ ID NO: 1940 - RNA, 19 nt, Artificial Sequence
  Synthetic
gcuaguaacuucacuuauu

SEQ ID NO: 1941 - RNA, 19 nt, Artificial Sequence
  Synthetic
gcacaacaugauccggaua

SEQ ID NO: 1942 - RNA, 19 nt, Artificial Sequence
  Synthetic
augcacagcuacaggcuuu

SEQ ID NO: 1943 - RNA, 19 nt, Artificial Sequence
  Synthetic
guugauuccuuaugcaaau

SEQ ID NO: 1944 - RNA, 19 nt, Artificial Sequence
  Synthetic
gcuacaggcuuucuacuua

SEQ ID NO: 1945 - RNA, 19 nt, Artificial Sequence
  Synthetic
aauggagggaagauagaaa

SEQ ID NO: 1946 - RNA, 19 nt, Artificial Sequence
  Synthetic
ccagagaagugguuuagga

SEQ ID NO: 1947 - RNA, 19 nt, Artificial Sequence
  Synthetic
acaaagggcuucagguaga

SEQ ID NO: 1948 - RNA, 19 nt, Artificial Sequence
  Synthetic
gaucacaaggucaggaaau

SEQ ID NO: 1949 - RNA, 19 nt, Artificial Sequence
  Synthetic
ccaugaaugaagagaacuu

SEQ ID NO: 1950 - RNA, 19 nt, Artificial Sequence
  Synthetic
ucacaaagggcuucaggua

SEQ ID NO: 1951 - RNA, 19 nt, Artificial Sequence
  Synthetic
gaaaugggguaaauagaaa

SEQ ID NO: 1952 - RNA, 19 nt, Artificial Sequence
  Synthetic
gcucugugcugguaccaaa

SEQ ID NO: 1953 - RNA, 19 nt, Artificial Sequence
  Synthetic
ugacgaaaguggagcuaac

SEQ ID NO: 1954 - RNA, 19 nt, Artificial Sequence
  Synthetic
uuacaaaccaucacacuua

SEQ ID NO: 1955 - RNA, 19 nt, Artificial Sequence
  Synthetic
ggccaaggcagguagauca

SEQ ID NO: 1956 - RNA, 19 nt, Artificial Sequence
  Synthetic
uuacaguauuccucacaaa

SEQ ID NO: 1957 - RNA, 19 nt, Artificial Sequence
  Synthetic
ccaagcagaucguccagaa

SEQ ID NO: 1958 - RNA, 19 nt, Artificial Sequence
  Synthetic
gagauuuaccugugagaug

SEQ ID NO: 1959 - RNA, 19 nt, Artificial Sequence
  Synthetic
ggcagaugcuuuucuuaua

SEQ ID NO: 1960 - RNA, 19 nt, Artificial Sequence
  Synthetic
gggagcaguucuauaagau

SEQ ID NO: 1961 - RNA, 19 nt, Artificial Sequence
  Synthetic
gcagaugcuuuucuuauaa

SEQ ID NO: 1962 - RNA, 19 nt, Artificial Sequence
  Synthetic
gcgaugaccccaugggcua

SEQ ID NO: 1963 - RNA, 19 nt, Artificial Sequence
  Synthetic
acagcuuacugcaguuuua

SEQ ID NO: 1964 - RNA, 19 nt, Artificial Sequence
  Synthetic
gucaggaaauugagaccau

SEQ ID NO: 1965 - RNA, 19 nt, Artificial Sequence
  Synthetic
caaggcagguagaucacaa

SEQ ID NO: 1966 - RNA, 19 nt, Artificial Sequence
  Synthetic
uggcagagcccaaugacga

SEQ ID NO: 1967 - RNA, 19 nt, Artificial Sequence
  Synthetic
gcgaugaccgggagcaguu

SEQ ID NO: 1968 - RNA, 19 nt, Artificial Sequence
  Synthetic
ccacuugauuacccguuaa

SEQ ID NO: 1969 - RNA, 19 nt, Artificial Sequence
  Synthetic
ggcaacagagcgagacuca

SEQ ID NO: 1970 - RNA, 19 nt, Artificial Sequence
  Synthetic
gaucaugggcccagaagac

SEQ ID NO: 1971 - RNA, 19 nt, Artificial Sequence
  Synthetic
gagcaguucuauaagauug

SEQ ID NO: 1972 - RNA, 19 nt, Artificial Sequence
  Synthetic
accaucacacuuagaaaua

SEQ ID NO: 1973 - RNA, 19 nt, Artificial Sequence
  Synthetic
caacagagcgagacucagu

SEQ ID NO: 1974 - RNA, 19 nt, Artificial Sequence
  Synthetic
caucacacuuagaaauacu

SEQ ID NO: 1975 - RNA, 19 nt, Artificial Sequence
  Synthetic
gguuguaccugccagacuu

SEQ ID NO: 1976 - RNA, 19 nt, Artificial Sequence
  Synthetic
ggagcaguucuauaagauu

SEQ ID NO: 1977 - RNA, 19 nt, Artificial Sequence
  Synthetic
ggaaauagccgcucugaua

SEQ ID NO: 1978 - RNA, 19 nt, Artificial Sequence
  Synthetic
aagaguacauccagaaaua

SEQ ID NO: 1979 - RNA, 19 nt, Artificial Sequence
  Synthetic
ggacagcacaggaggagaa

SEQ ID NO: 1980 - RNA, 19 nt, Artificial Sequence
  Synthetic
gauagguagaugugaguaa

SEQ ID NO: 1981 - RNA, 19 nt, Artificial Sequence
  Synthetic
cagaagaauacaagcagaa

SEQ ID NO: 1982 - RNA, 19 nt, Artificial Sequence
  Synthetic
gggaggacuuaaugaauuu

SEQ ID NO: 1983 - RNA, 19 nt, Artificial Sequence
  Synthetic
cggaggaggcgcugaaaga

SEQ ID NO: 1984 - RNA, 19 nt, Artificial Sequence
  Synthetic
caugagaagcagacuauaa

SEQ ID NO: 1985 - RNA, 19 nt, Artificial Sequence
  Synthetic
ggcaagaggcggauggaca

SEQ ID NO: 1986 - RNA, 19 nt, Artificial Sequence
  Synthetic
aagaugaggcccaggauau

SEQ ID NO: 1987 - RNA, 19 nt, Artificial Sequence
  Synthetic
acugaacugucgaaggaaa

SEQ ID NO: 1988 - RNA, 19 nt, Artificial Sequence
  Synthetic
uuagaaagguugcagauuu

SEQ ID NO: 1989 - RNA, 19 nt, Artificial Sequence
  Synthetic
gggagcuaauuaagaguau

SEQ ID NO: 1990 - RNA, 19 nt, Artificial Sequence
  Synthetic
ucaagcucaucgagaguaa

SEQ ID NO: 1991 - RNA, 19 nt, Artificial Sequence
  Synthetic
guauaaagcagggagcuaa

SEQ ID NO: 1992 - RNA, 19 nt, Artificial Sequence
  Synthetic
auauggaguuguaguagaa

SEQ ID NO: 1993 - RNA, 19 nt, Artificial Sequence
  Synthetic
gcagaaaauuaaagaguac

SEQ ID NO: 1994 - RNA, 19 nt, Artificial Sequence
  Synthetic
ccagaagaauacaagcaga

SEQ ID NO: 1995 - RNA, 19 nt, Artificial Sequence
  Synthetic
gaagaugaggcccaggaua

SEQ ID NO: 1996 - RNA, 19 nt, Artificial Sequence
  Synthetic
ccaauauauuugaguccuu

SEQ ID NO: 1997 - RNA, 19 nt, Artificial Sequence
  Synthetic
cgcugaaagaacaggaaga

SEQ ID NO: 1998 - RNA, 19 nt, Artificial Sequence
  Synthetic
gauauggaguuguaguaga

SEQ ID NO: 1999 - RNA, 19 nt, Artificial Sequence
  Synthetic
gagaagcagacuauaauau

SEQ ID NO: 2000 - RNA, 19 nt, Artificial Sequence
  Synthetic
gaagaauacaagcagaaaa

SEQ ID NO: 2001 - RNA, 19 nt, Artificial Sequence
  Synthetic
gagaguaaacaugagguua

SEQ ID NO: 2002 - RNA, 19 nt, Artificial Sequence
  Synthetic
cuacugaacugucgaagga

SEQ ID NO: 2003 - RNA, 19 nt, Artificial Sequence
  Synthetic
gaguggaccuaccugauaa

SEQ ID NO: 2004 - RNA, 19 nt, Artificial Sequence
  Synthetic
ugggaggacuuaaugaauu

SEQ ID NO: 2005 - RNA, 19 nt, Artificial Sequence
  Synthetic
agaaauacgccacggagga

SEQ ID NO: 2006 - RNA, 19 nt, Artificial Sequence
  Synthetic
aguuauuggccuauccuaa

SEQ ID NO: 2007 - RNA, 19 nt, Artificial Sequence
  Synthetic
gaggaaagcauggaggaaa

SEQ ID NO: 2008 - RNA, 19 nt, Artificial Sequence
  Synthetic
gggaaggaggcuuguuuaa

SEQ ID NO: 2009 - RNA, 19 nt, Artificial Sequence
  Synthetic
ccaucuuagaggaggacaa

SEQ ID NO: 2010 - RNA, 19 nt, Artificial Sequence
  Synthetic
gaaaaggguccgagcacaa

SEQ ID NO: 2011 - RNA, 19 nt, Artificial Sequence
  Synthetic
gagcacaagccaagaaguu

SEQ ID NO: 2012 - RNA, 19 nt, Artificial Sequence
  Synthetic
aggaaagcauggaggaaag

SEQ ID NO: 2013 - RNA, 19 nt, Artificial Sequence
  Synthetic
ggaggaacguguggaguuu

SEQ ID NO: 2014 - RNA, 19 nt, Artificial Sequence
  Synthetic
aaucuaaaguugcuccaua

SEQ ID NO: 2015 - RNA, 19 nt, Artificial Sequence
  Synthetic
cagcucaagcagaggccua

SEQ ID NO: 2016 - RNA, 19 nt, Artificial Sequence
  Synthetic
gaauacaggaacuucuaaa

SEQ ID NO: 2017 - RNA, 19 nt, Artificial Sequence
  Synthetic
cagaguggaguacgagaaa

SEQ ID NO: 2018 - RNA, 19 nt, Artificial Sequence
  Synthetic
gcagaggccuacacgauuu

SEQ ID NO: 2019 - RNA, 19 nt, Artificial Sequence
  Synthetic
gggccugugucuuggacuu

SEQ ID NO: 2020 - RNA, 19 nt, Artificial Sequence
  Synthetic
acaggaacuucuaaaugaa

SEQ ID NO: 2021 - RNA, 19 nt, Artificial Sequence
  Synthetic
ggaucuguguuuggugaaa

SEQ ID NO: 2022 - RNA, 19 nt, Artificial Sequence
  Synthetic
agaggaaagcauggaggaa

SEQ ID NO: 2023 - RNA, 19 nt, Artificial Sequence
  Synthetic
cuguguugcuguuuaggua

SEQ ID NO: 2024 - RNA, 19 nt, Artificial Sequence
  Synthetic
gaggaaagaccacccauuu

SEQ ID NO: 2025 - RNA, 19 nt, Artificial Sequence
  Synthetic
ggaaggaggcuuguuuaaa

SEQ ID NO: 2026 - RNA, 19 nt, Artificial Sequence
  Synthetic
uaaaguugcuccauacaau

SEQ ID NO: 2027 - RNA, 19 nt, Artificial Sequence
  Synthetic
agaaggaagggauugguuu

SEQ ID NO: 2028 - RNA, 19 nt, Artificial Sequence
  Synthetic
gggauugguuuggcaagaa

SEQ ID NO: 2029 - RNA, 19 nt, Artificial Sequence
  Synthetic
uggaggaacguguggaguu

SEQ ID NO: 2030 - RNA, 19 nt, Artificial Sequence
  Synthetic
acagaguggaguacgagaa

SEQ ID NO: 2031 - RNA, 19 nt, Artificial Sequence
  Synthetic
gccaaaacagaguggagua

SEQ ID NO: 2032 - RNA, 19 nt, Artificial Sequence
  Synthetic
gcccaggagaggaaagcau

SEQ ID NO: 2033 - RNA, 19 nt, Artificial Sequence
  Synthetic
ggaggaaagaccacccauu

SEQ ID NO: 2034 - RNA, 19 nt, Artificial Sequence
  Synthetic
aagcagaggccuacacgau

SEQ ID NO: 2035 - RNA, 19 nt, Artificial Sequence
  Synthetic
gagaggaaagcauggagga

SEQ ID NO: 2036 - RNA, 19 nt, Artificial Sequence
  Synthetic
uauccaagacccagcucaa

SEQ ID NO: 2037 - RNA, 19 nt, Artificial Sequence
  Synthetic
uguagaauguauagggaua

SEQ ID NO: 2038 - RNA, 19 nt, Artificial Sequence
  Synthetic
gaguauaaggacagcauua

SEQ ID NO: 2039 - RNA, 19 nt, Artificial Sequence
  Synthetic
aagaagagcacuugccaaa

SEQ ID NO: 2040 - RNA, 19 nt, Artificial Sequence
  Synthetic
gcaaauaagcuuuaaggca

SEQ ID NO: 2041 - RNA, 19 nt, Artificial Sequence
  Synthetic
gcuuuaaggcagaagucaa

SEQ ID NO: 2042 - RNA, 19 nt, Artificial Sequence
  Synthetic
cagccuucguggaguauaa

SEQ ID NO: 2043 - RNA, 19 nt, Artificial Sequence
  Synthetic
ugaaagaagcggcagaauu

SEQ ID NO: 2044 - RNA, 19 nt, Artificial Sequence
  Synthetic
ccaaagaacuggcuaggca

SEQ ID NO: 2045 - RNA, 19 nt, Artificial Sequence
  Synthetic
gaauauaucuggcaaacga

SEQ ID NO: 2046 - RNA, 19 nt, Artificial Sequence
  Synthetic
gagaauuacuaguuacuca

SEQ ID NO: 2047 - RNA, 19 nt, Artificial Sequence
  Synthetic
ggguauaaucuaagaauug

SEQ ID NO: 2048 - RNA, 19 nt, Artificial Sequence
  Synthetic
guauagggauagaagaguu

SEQ ID NO: 2049 - RNA, 19 nt, Artificial Sequence
  Synthetic
cgacgaauauaucuggcaa

SEQ ID NO: 2050 - RNA, 19 nt, Artificial Sequence
  Synthetic
aaauaagcuuuaaggcaga

SEQ ID NO: 2051 - RNA, 19 nt, Artificial Sequence
  Synthetic
uaggagauguacuggaauu

SEQ ID NO: 2052 - RNA, 19 nt, Artificial Sequence
  Synthetic
cuauauugcccuuugaaau

SEQ ID NO: 2053 - RNA, 19 nt, Artificial Sequence
  Synthetic
cagagaagguugucuacuu

SEQ ID NO: 2054 - RNA, 19 nt, Artificial Sequence
  Synthetic
cagcagagucagagaaggu

SEQ ID NO: 2055 - RNA, 19 nt, Artificial Sequence
  Synthetic
cauaggagauguacuggaa

SEQ ID NO: 2056 - RNA, 19 nt, Artificial Sequence
  Synthetic
ccuaaacauucuucaguga

SEQ ID NO: 2057 - RNA, 19 nt, Artificial Sequence
  Synthetic
aagcaaaacuccucaagua

SEQ ID NO: 2058 - RNA, 19 nt, Artificial Sequence
  Synthetic
gucaaacauuuaugaggaa

SEQ ID NO: 2059 - RNA, 19 nt, Artificial Sequence
  Synthetic
gaauggcacuucacgguua

SEQ ID NO: 2060 - RNA, 19 nt, Artificial Sequence
  Synthetic
agucagagaagguugucua

SEQ ID NO: 2061 - RNA, 19 nt, Artificial Sequence
  Synthetic
ccauagguucucuagauua

SEQ ID NO: 2062 - RNA, 19 nt, Artificial Sequence
  Synthetic
gaaagaagcggcagaauug

SEQ ID NO: 2063 - RNA, 19 nt, Artificial Sequence
  Synthetic
caaauaagcuuuaaggcag

SEQ ID NO: 2064 - RNA, 19 nt, Artificial Sequence
  Synthetic
ggcuaauggucgauuugaa

SEQ ID NO: 2065 - RNA, 19 nt, Artificial Sequence
  Synthetic
uggcagccuucguggagua

SEQ ID NO: 2066 - RNA, 19 nt, Artificial Sequence
  Synthetic
gcuaagaauaccuccauga

SEQ ID NO: 2067 - RNA, 19 nt, Artificial Sequence
  Synthetic
acagaaagcacaagacgaa

SEQ ID NO: 2068 - RNA, 19 nt, Artificial Sequence
  Synthetic
gcuccuagguuuagcuuuu

SEQ ID NO: 2069 - RNA, 19 nt, Artificial Sequence
  Synthetic
ucagugaguugaaaggaaa

SEQ ID NO: 2070 - RNA, 19 nt, Artificial Sequence
  Synthetic
cugaagucguggaggagau

SEQ ID NO: 2071 - RNA, 19 nt, Artificial Sequence
  Synthetic
guugaaaggaaauguguuu

SEQ ID NO: 2072 - RNA, 19 nt, Artificial Sequence
  Synthetic
uauuagauguggucacuua

SEQ ID NO: 2073 - RNA, 19 nt, Artificial Sequence
  Synthetic
acaaauguguuuacaguca

SEQ ID NO: 2074 - RNA, 19 nt, Artificial Sequence
  Synthetic
guauagagacgucggacuu

SEQ ID NO: 2075 - RNA, 19 nt, Artificial Sequence
  Synthetic
ccaccaggcuccuagguuu

SEQ ID NO: 2076 - RNA, 19 nt, Artificial Sequence
  Synthetic
guggaggagauuaaacaaa

SEQ ID NO: 2077 - RNA, 19 nt, Artificial Sequence
  Synthetic
gugcuggauuuguagcuua

SEQ ID NO: 2078 - RNA, 19 nt, Artificial Sequence
  Synthetic
cgaacuuguuugugauagu

SEQ ID NO: 2079 - RNA, 19 nt, Artificial Sequence
  Synthetic
aagucguggaggagauuaa

SEQ ID NO: 2080 - RNA, 19 nt, Artificial Sequence
  Synthetic
cagagaauuuccuuucaaa

SEQ ID NO: 2081 - RNA, 19 nt, Artificial Sequence
  Synthetic
gugcagaguuuagcauuua

SEQ ID NO: 2082 - RNA, 19 nt, Artificial Sequence
  Synthetic
agugcagaguuuagcauuu

SEQ ID NO: 2083 - RNA, 19 nt, Artificial Sequence
  Synthetic
ggguuuggucucagcauuu

SEQ ID NO: 2084 - RNA, 19 nt, Artificial Sequence
  Synthetic
acgggagguuuaagugcaa

SEQ ID NO: 2085 - RNA, 19 nt, Artificial Sequence
  Synthetic
uggaggagauuaaacaaaa

SEQ ID NO: 2086 - RNA, 19 nt, Artificial Sequence
  Synthetic
uggcuauuaucauggaaaa

SEQ ID NO: 2087 - RNA, 19 nt, Artificial Sequence
  Synthetic
caccaggcuccuagguuua

SEQ ID NO: 2088 - RNA, 19 nt, Artificial Sequence
  Synthetic
ugagcuucaugguggagaa

SEQ ID NO: 2089 - RNA, 19 nt, Artificial Sequence
  Synthetic
gcacaagacgaacucagua

SEQ ID NO: 2090 - RNA, 19 nt, Artificial Sequence
  Synthetic
ggccuugugugcuggauuu

SEQ ID NO: 2091 - RNA, 19 nt, Artificial Sequence
  Synthetic
guguuuacagucagaauga

SEQ ID NO: 2092 - RNA, 19 nt, Artificial Sequence
  Synthetic
uuaugaagguggcuauuau

SEQ ID NO: 2093 - RNA, 19 nt, Artificial Sequence
  Synthetic
agacgaacucaguagcaga

SEQ ID NO: 2094 - RNA, 19 nt, Artificial Sequence
  Synthetic
guggcuauuaucauggaaa

SEQ ID NO: 2095 - RNA, 19 nt, Artificial Sequence
  Synthetic
ccagagaauuuccuuucaa

SEQ ID NO: 2096 - RNA, 19 nt, Artificial Sequence
  Synthetic
cccaguaucuauaugauca

SEQ ID NO: 2097 - RNA, 19 nt, Artificial Sequence
  Synthetic
ccucaguucuugugugaaa

SEQ ID NO: 2098 - RNA, 19 nt, Artificial Sequence
  Synthetic
ugaaggagcuugaagaaau

SEQ ID NO: 2099 - RNA, 19 nt, Artificial Sequence
  Synthetic
uaagaaugcugaagaguuu

SEQ ID NO: 2100 - RNA, 19 nt, Artificial Sequence
  Synthetic
gcugaagaguuuacaaaga

SEQ ID NO: 2101 - RNA, 19 nt, Artificial Sequence
  Synthetic
ccgcaaaugugggaugaaa

SEQ ID NO: 2102 - RNA, 19 nt, Artificial Sequence
  Synthetic
ugaugaaucucgccagaaa

SEQ ID NO: 2103 - RNA, 19 nt, Artificial Sequence
  Synthetic
acaaagaaauauggggaaa

SEQ ID NO: 2104 - RNA, 19 nt, Artificial Sequence
  Synthetic
cugaagaguuuacaaagaa

SEQ ID NO: 2105 - RNA, 19 nt, Artificial Sequence
  Synthetic
gaaaagugaugauggauuu

SEQ ID NO: 2106 - RNA, 19 nt, Artificial Sequence
  Synthetic
ccagaauguccguuugaaa

SEQ ID NO: 2107 - RNA, 19 nt, Artificial Sequence
  Synthetic
guggagaagaugacuuaaa

SEQ ID NO: 2108 - RNA, 19 nt, Artificial Sequence
  Synthetic
gaugaaggagcuugaagaa

SEQ ID NO: 2109 - RNA, 19 nt, Artificial Sequence
  Synthetic
gacuagauccuguggagaa

SEQ ID NO: 2110 - RNA, 19 nt, Artificial Sequence
  Synthetic
cagagaagcccuauaauca

SEQ ID NO: 2111 - RNA, 19 nt, Artificial Sequence
  Synthetic
gcacagagaagcccuauaa

SEQ ID NO: 2112 - RNA, 19 nt, Artificial Sequence
  Synthetic
ccaccgaagaucacauuua

SEQ ID NO: 2113 - RNA, 19 nt, Artificial Sequence
  Synthetic
gcagaaaagugaugaugga

SEQ ID NO: 2114 - RNA, 19 nt, Artificial Sequence
  Synthetic
ccucauagcacuggugaau

SEQ ID NO: 2115 - RNA, 19 nt, Artificial Sequence
  Synthetic
guaagaaugcugaagaguu

SEQ ID NO: 2116 - RNA, 19 nt, Artificial Sequence
  Synthetic
ugaccuagcugaagaauac

SEQ ID NO: 2117 - RNA, 19 nt, Artificial Sequence
  Synthetic
ccuucagaaucgaaaucaa

SEQ ID NO: 2118 - RNA, 19 nt, Artificial Sequence
  Synthetic
gagaagaugacuuaaacuu

SEQ ID NO: 2119 - RNA, 19 nt, Artificial Sequence
  Synthetic
gcaggaggcugaugaagga

SEQ ID NO: 2120 - RNA, 19 nt, Artificial Sequence
  Synthetic
gccaguaauuagugccgaa

SEQ ID NO: 2121 - RNA, 19 nt, Artificial Sequence
  Synthetic
gggcugaccuagcugaaga

SEQ ID NO: 2122 - RNA, 19 nt, Artificial Sequence
  Synthetic
acccaaacaucgacgaaaa

SEQ ID NO: 2123 - RNA, 19 nt, Artificial Sequence
  Synthetic
aagcaggacucuguggaaa

SEQ ID NO: 2124 - RNA, 19 nt, Artificial Sequence
  Synthetic
gcuugaagaaauccgcaaa

SEQ ID NO: 2125 - RNA, 19 nt, Artificial Sequence
  Synthetic
ccagguugaugaagcuaau

SEQ ID NO: 2126 - RNA, 19 nt, Artificial Sequence
  Synthetic
gguugaugaagcuaauuua

SEQ ID NO: 2127 - RNA, 19 nt, Artificial Sequence
  Synthetic
ggacgagaacggacagauu

SEQ ID NO: 2128 - RNA, 19 nt, Artificial Sequence
  Synthetic
gugaauagaccgaauauca

SEQ ID NO: 2129 - RNA, 19 nt, Artificial Sequence
  Synthetic
ugaaggagcuggaggaucu

SEQ ID NO: 2130 - RNA, 19 nt, Artificial Sequence
  Synthetic
ccucagacugugaaguaua

SEQ ID NO: 2131 - RNA, 19 nt, Artificial Sequence
  Synthetic
gaaagaaugccgaagaguu

SEQ ID NO: 2132 - RNA, 19 nt, Artificial Sequence
  Synthetic
aaaccauguucuugcuuaa

SEQ ID NO: 2133 - RNA, 19 nt, Artificial Sequence
  Synthetic
gaguuuaaguuugcaguua

SEQ ID NO: 2134 - RNA, 19 nt, Artificial Sequence
  Synthetic
cuucuuagguuguuaguca

SEQ ID NO: 2135 - RNA, 19 nt, Artificial Sequence
  Synthetic
gguuguuagucauuaguuu

SEQ ID NO: 2136 - RNA, 19 nt, Artificial Sequence
  Synthetic
gcacuggauccucggcaua

SEQ ID NO: 2137 - RNA, 19 nt, Artificial Sequence
  Synthetic
agugagaacuggaagccuu

SEQ ID NO: 2138 - RNA, 19 nt, Artificial Sequence
  Synthetic
gaguguguguguuguguau

SEQ ID NO: 2139 - RNA, 19 nt, Artificial Sequence
  Synthetic
gucacaaucugaagaauca

SEQ ID NO: 2140 - RNA, 19 nt, Artificial Sequence
  Synthetic
auccggagcuguucagaaa

SEQ ID NO: 2141 - RNA, 19 nt, Artificial Sequence
  Synthetic
ugaugggaauauacagauu

SEQ ID NO: 2142 - RNA, 19 nt, Artificial Sequence
  Synthetic
ccggagcuguucagaaaga

SEQ ID NO: 2143 - RNA, 19 nt, Artificial Sequence
  Synthetic
gcuggugaauagaccgaau

SEQ ID NO: 2144 - RNA, 19 nt, Artificial Sequence
  Synthetic
guucagaaagaaugccgaa

SEQ ID NO: 2145 - RNA, 19 nt, Artificial Sequence
  Synthetic
guuuaaguuugcaguuaca

SEQ ID NO: 2146 - RNA, 19 nt, Artificial Sequence
  Synthetic
ucagaaagaaugccgaaga

SEQ ID NO: 2147 - RNA, 19 nt, Artificial Sequence
  Synthetic
ccaagccacugaugggaau

SEQ ID NO: 2148 - RNA, 19 nt, Artificial Sequence
  Synthetic
aaagaaugccgaagaguuc

SEQ ID NO: 2149 - RNA, 19 nt, Artificial Sequence
  Synthetic
ggccucagacugugaagua

SEQ ID NO: 2150 - RNA, 19 nt, Artificial Sequence
  Synthetic
ugaucaaauucacaaccaa

SEQ ID NO: 2151 - RNA, 19 nt, Artificial Sequence
  Synthetic
ggaccaggccucagacugu

SEQ ID NO: 2152 - RNA, 19 nt, Artificial Sequence
  Synthetic
gaaaccauguucuugcuua

SEQ ID NO: 2153 - RNA, 19 nt, Artificial Sequence
  Synthetic
caucaucagcagugagaac

SEQ ID NO: 2154 - RNA, 19 nt, Artificial Sequence
  Synthetic
gcaugcgaguggugaagga

SEQ ID NO: 2155 - RNA, 19 nt, Artificial Sequence
  Synthetic
ggagcuguucagaaagaau

SEQ ID NO: 2156 - RNA, 19 nt, Artificial Sequence
  Synthetic
guauauauccuccagcauu

SEQ ID NO: 2157 - RNA, 19 nt, Artificial Sequence
  Synthetic
acauugaccucgagggcaa

SEQ ID NO: 2158 - RNA, 19 nt, Artificial Sequence
  Synthetic
cagagguccugcagaacaa

SEQ ID NO: 2159 - RNA, 19 nt, Artificial Sequence
  Synthetic
ccgaggacccacugaacaa

SEQ ID NO: 2160 - RNA, 19 nt, Artificial Sequence
  Synthetic
ggaaguuuguguucaguuu

SEQ ID NO: 2161 - RNA, 19 nt, Artificial Sequence
  Synthetic
aggugaagugugagacaau

SEQ ID NO: 2162 - RNA, 19 nt, Artificial Sequence
  Synthetic
cuacaagagugggaaguuu

SEQ ID NO: 2163 - RNA, 19 nt, Artificial Sequence
  Synthetic
ggauccagaaggacauaaa

SEQ ID NO: 2164 - RNA, 19 nt, Artificial Sequence
  Synthetic
gaaauaggguuggcgcaua

SEQ ID NO: 2165 - RNA, 19 nt, Artificial Sequence
  Synthetic
cugcccaagacgugugaua

SEQ ID NO: 2166 - RNA, 19 nt, Artificial Sequence
  Synthetic
uuaaggugggccaggguua

SEQ ID NO: 2167 - RNA, 19 nt, Artificial Sequence
  Synthetic
agaagaaggaggaggaguc

SEQ ID NO: 2168 - RNA, 19 nt, Artificial Sequence
  Synthetic
agccaguccuuacgauaaa

SEQ ID NO: 2169 - RNA, 19 nt, Artificial Sequence
  Synthetic
gaugagggcuucuacaaga

SEQ ID NO: 2170 - RNA, 19 nt, Artificial Sequence
  Synthetic
aggacauaaacgagcugaa

SEQ ID NO: 2171 - RNA, 19 nt, Artificial Sequence
  Synthetic
caaggugaagugugagaca

SEQ ID NO: 2172 - RNA, 19 nt, Artificial Sequence
  Synthetic
cugcggauccagaaggaca

SEQ ID NO: 2173 - RNA, 19 nt, Artificial Sequence
  Synthetic
aagccaguccuuacgauaa

SEQ ID NO: 2174 - RNA, 19 nt, Artificial Sequence
  Synthetic
gaagccaguccuuacgaua

SEQ ID NO: 2175 - RNA, 19 nt, Artificial Sequence
  Synthetic
gagcugaaccugcccaaga

SEQ ID NO: 2176 - RNA, 19 nt, Artificial Sequence
  Synthetic
cagacgaccuccucaacuu

SEQ ID NO: 2177 - RNA, 19 nt, Artificial Sequence
  Synthetic
gcaccaagggcagcagcaa

SEQ ID NO: 2178 - RNA, 19 nt, Artificial Sequence
  Synthetic
gccucaacauccucagaga

SEQ ID NO: 2179 - RNA, 19 nt, Artificial Sequence
  Synthetic
ugaagcagcagaagaagga

SEQ ID NO: 2180 - RNA, 19 nt, Artificial Sequence
  Synthetic
aaauaggguuggcgcauac

SEQ ID NO: 2181 - RNA, 19 nt, Artificial Sequence
  Synthetic
gauaucagcuucucagauc

SEQ ID NO: 2182 - RNA, 19 nt, Artificial Sequence
  Synthetic
gcccaagacgugugauauc

SEQ ID NO: 2183 - RNA, 19 nt, Artificial Sequence
  Synthetic
uaauuuauggccugcagua

SEQ ID NO: 2184 - RNA, 19 nt, Artificial Sequence
  Synthetic
ggacauaaacgagcugaac

SEQ ID NO: 2185 - RNA, 19 nt, Artificial Sequence
  Synthetic
ccacgugccccuaguuauu

SEQ ID NO: 2186 - RNA, 19 nt, Artificial Sequence
  Synthetic
uuuaacaccaggcuaacua

SEQ ID NO: 2187 - RNA, 19 nt, Artificial Sequence
  Synthetic
caacgaagcccaagccaua

SEQ ID NO: 2188 - RNA, 19 nt, Artificial Sequence
  Synthetic
ggacacagucuuagaaaca

SEQ ID NO: 2189 - RNA, 19 nt, Artificial Sequence
  Synthetic
ggcuauaugccaugaauaa

SEQ ID NO: 2190 - RNA, 19 nt, Artificial Sequence
  Synthetic
agacaaguugggaagaaua

SEQ ID NO: 2191 - RNA, 19 nt, Artificial Sequence
  Synthetic
gaagguaguugucagguua

SEQ ID NO: 2192 - RNA, 19 nt, Artificial Sequence
  Synthetic
caucuggauuguugugaaa

SEQ ID NO: 2193 - RNA, 19 nt, Artificial Sequence
  Synthetic
cauccugguuuaaguauaa

SEQ ID NO: 2194 - RNA, 19 nt, Artificial Sequence
  Synthetic
gggagguaguuuaauuuua

SEQ ID NO: 2195 - RNA, 19 nt, Artificial Sequence
  Synthetic
ccgaaccagaugagagcaa

SEQ ID NO: 2196 - RNA, 19 nt, Artificial Sequence
  Synthetic
cagaugauccauuagcaaa

SEQ ID NO: 2197 - RNA, 19 nt, Artificial Sequence
  Synthetic
ggacuaggcuauaugccau

SEQ ID NO: 2198 - RNA, 19 nt, Artificial Sequence
  Synthetic
guagacaaguugggaagaa

SEQ ID NO: 2199 - RNA, 19 nt, Artificial Sequence
  Synthetic
uauaaagcacugugaauga

SEQ ID NO: 2200 - RNA, 19 nt, Artificial Sequence
  Synthetic
gcaucaaagccgaaccaga

SEQ ID NO: 2201 - RNA, 19 nt, Artificial Sequence
  Synthetic
caucaaagccgaaccagau

SEQ ID NO: 2202 - RNA, 19 nt, Artificial Sequence
  Synthetic
gggagggacuuuuaaacuu

SEQ ID NO: 2203 - RNA, 19 nt, Artificial Sequence
  Synthetic
gggaagaauauguuuagau

SEQ ID NO: 2204 - RNA, 19 nt, Artificial Sequence
  Synthetic
acacagucuuagaaacauu

SEQ ID NO: 2205 - RNA, 19 nt, Artificial Sequence
  Synthetic
ucuggaaacuucuguaaau

SEQ ID NO: 2206 - RNA, 19 nt, Artificial Sequence
  Synthetic
ccagaugauccauuagcaa

SEQ ID NO: 2207 - RNA, 19 nt, Artificial Sequence
  Synthetic
cuaauaacauugcugucaa

SEQ ID NO: 2208 - RNA, 19 nt, Artificial Sequence
  Synthetic
agcccaagccauagaaaca

SEQ ID NO: 2209 - RNA, 19 nt, Artificial Sequence
  Synthetic
caaaugauguagcggagca

SEQ ID NO: 2210 - RNA, 19 nt, Artificial Sequence
  Synthetic
ccauccugguuuaaguaua

SEQ ID NO: 2211 - RNA, 19 nt, Artificial Sequence
  Synthetic
gaucuaauugcauugguua

SEQ ID NO: 2212 - RNA, 19 nt, Artificial Sequence
  Synthetic
gagcagaggcuagaaguau

SEQ ID NO: 2213 - RNA, 19 nt, Artificial Sequence
  Synthetic
uaaccaggucuuuagaaua

SEQ ID NO: 2214 - RNA, 19 nt, Artificial Sequence
  Synthetic
auagaaacagcuagagcau

SEQ ID NO: 2215 - RNA, 19 nt, Artificial Sequence
  Synthetic
agaugauccauuagcaaau

SEQ ID NO: 2216 - RNA, 19 nt, Artificial Sequence
  Synthetic
aaccaggucuuuagaauau

SEQ ID NO: 2217 - RNA, 19 nt, Artificial Sequence
  Synthetic
augaaggagcucagggaua

SEQ ID NO: 2218 - RNA, 19 nt, Artificial Sequence
  Synthetic
cagaagacuuagaucacua

SEQ ID NO: 2219 - RNA, 19 nt, Artificial Sequence
  Synthetic
ccauagagucagugaucau

SEQ ID NO: 2220 - RNA, 19 nt, Artificial Sequence
  Synthetic
augaaaugaaagaggaaga

SEQ ID NO: 2221 - RNA, 19 nt, Artificial Sequence
  Synthetic
cuaugaaaugaaagaggaa

SEQ ID NO: 2222 - RNA, 19 nt, Artificial Sequence
  Synthetic
ccagauccucaaagagaaa

SEQ ID NO: 2223 - RNA, 19 nt, Artificial Sequence
  Synthetic
uggagaggcugguggacau

SEQ ID NO: 2224 - RNA, 19 nt, Artificial Sequence
  Synthetic
ccucaaagagaaagaagga

SEQ ID NO: 2225 - RNA, 19 nt, Artificial Sequence
  Synthetic
aagaugaagaugaggagau

SEQ ID NO: 2226 - RNA, 19 nt, Artificial Sequence
  Synthetic
gcugguggacauaaagaaa

SEQ ID NO: 2227 - RNA, 19 nt, Artificial Sequence
  Synthetic
agaugauggcauuggaaaa

SEQ ID NO: 2228 - RNA, 19 nt, Artificial Sequence
  Synthetic
cuuaaauggugcagugucu

SEQ ID NO: 2229 - RNA, 19 nt, Artificial Sequence
  Synthetic
ggaaauggagagacaguaa

SEQ ID NO: 2230 - RNA, 19 nt, Artificial Sequence
  Synthetic
ccacaacccuggcggaaua

SEQ ID NO: 2231 - RNA, 19 nt, Artificial Sequence
  Synthetic
caguaaaggaaaagacaaa

SEQ ID NO: 2232 - RNA, 19 nt, Artificial Sequence
  Synthetic
cgacauugaugaugaagau

SEQ ID NO: 2233 - RNA, 19 nt, Artificial Sequence
  Synthetic
ggagagacaguaaaggaaa

SEQ ID NO: 2234 - RNA, 19 nt, Artificial Sequence
  Synthetic
ggaucgaaagccugaaaua

SEQ ID NO: 2235 - RNA, 19 nt, Artificial Sequence
  Synthetic
gcauauacuggguagcaaa

SEQ ID NO: 2236 - RNA, 19 nt, Artificial Sequence
  Synthetic
gugcuaagccugaugaaau

SEQ ID NO: 2237 - RNA, 19 nt, Artificial Sequence
  Synthetic
agacaaagaauaugcugaa

SEQ ID NO: 2238 - RNA, 19 nt, Artificial Sequence
  Synthetic
aggaagaugccgacuguua

SEQ ID NO: 2239 - RNA, 19 nt, Artificial Sequence
  Synthetic
aagaugaggaggaggaaga

SEQ ID NO: 2240 - RNA, 19 nt, Artificial Sequence
  Synthetic
ccacuaaggccgaagcaga

SEQ ID NO: 2241 - RNA, 19 nt, Artificial Sequence
  Synthetic
gagagacaguaaaggaaaa

SEQ ID NO: 2242 - RNA, 19 nt, Artificial Sequence
  Synthetic
guucacaagugcugcauau

SEQ ID NO: 2243 - RNA, 19 nt, Artificial Sequence
  Synthetic
ucaguuauguucaggaaau

SEQ ID NO: 2244 - RNA, 19 nt, Artificial Sequence
  Synthetic
gaccuuuaauggagagaga

SEQ ID NO: 2245 - RNA, 19 nt, Artificial Sequence
  Synthetic
ucugaaagguggaauccua

SEQ ID NO: 2246 - RNA, 19 nt, Artificial Sequence
  Synthetic
agguuuagcugcucauuua

SEQ ID NO: 2247 - RNA, 19 nt, Artificial Sequence
  Synthetic
gaucgaaagccugaaauaa

SEQ ID NO: 2248 - RNA, 19 nt, Artificial Sequence
  Synthetic
caucagggacuuugugcua

SEQ ID NO: 2249 - RNA, 19 nt, Artificial Sequence
  Synthetic
gaguaacccuccacagaau

SEQ ID NO: 2250 - RNA, 19 nt, Artificial Sequence
  Synthetic
gcggaauacugcaucaaaa

SEQ ID NO: 2251 - RNA, 19 nt, Artificial Sequence
  Synthetic
ccuucagauucuugaccaa

SEQ ID NO: 2252 - RNA, 19 nt, Artificial Sequence
  Synthetic
uuaugagaauggagaugua

SEQ ID NO: 2253 - RNA, 19 nt, Artificial Sequence
  Synthetic
aucgaaagccugaaauaaa

SEQ ID NO: 2254 - RNA, 19 nt, Artificial Sequence
  Synthetic
ucgaaagccugaaauaaau

SEQ ID NO: 2255 - RNA, 19 nt, Artificial Sequence
  Synthetic
acagaauguucacagcaaa

SEQ ID NO: 2256 - RNA, 19 nt, Artificial Sequence
  Synthetic
guggaauccuacucagaau

SEQ ID NO: 2257 - RNA, 19 nt, Artificial Sequence
  Synthetic
ccaugaaaccaucguaaca

SEQ ID NO: 2258 - RNA, 19 nt, Artificial Sequence
  Synthetic
gcugaaauuauuaggaaac

SEQ ID NO: 2259 - RNA, 19 nt, Artificial Sequence
  Synthetic
uggagaacuacgaggagua

SEQ ID NO: 2260 - RNA, 19 nt, Artificial Sequence
  Synthetic
gcaucaaggucuuucccaa

SEQ ID NO: 2261 - RNA, 19 nt, Artificial Sequence
  Synthetic
ccaagaagcaugcuggcga

SEQ ID NO: 2262 - RNA, 19 nt, Artificial Sequence
  Synthetic
ucaacgugcucaagaggga

SEQ ID NO: 2263 - RNA, 19 nt, Artificial Sequence
  Synthetic
ggaaauagguguauggaua

SEQ ID NO: 2264 - RNA, 19 nt, Artificial Sequence
  Synthetic
ggacaaacauacaacaauu

SEQ ID NO: 2265 - RNA, 19 nt, Artificial Sequence
  Synthetic
gaugaaagcguguggagaa

SEQ ID NO: 2266 - RNA, 19 nt, Artificial Sequence
  Synthetic
cuaaugauguccaaagaaa

SEQ ID NO: 2267 - RNA, 19 nt, Artificial Sequence
  Synthetic
ggaagaacuugaagaagga

SEQ ID NO: 2268 - RNA, 19 nt, Artificial Sequence
  Synthetic
cagaauauauagccugaaa

SEQ ID NO: 2269 - RNA, 19 nt, Artificial Sequence
  Synthetic
cgaaauagaauucagguuu

SEQ ID NO: 2270 - RNA, 19 nt, Artificial Sequence
  Synthetic
guguacuucuugugaauua

SEQ ID NO: 2271 - RNA, 19 nt, Artificial Sequence
  Synthetic
aguagaauguggaccuaaa

SEQ ID NO: 2272 - RNA, 19 nt, Artificial Sequence
  Synthetic
aguuguacuucaagagcua

SEQ ID NO: 2273 - RNA, 19 nt, Artificial Sequence
  Synthetic
ccucagagacugugccauu

SEQ ID NO: 2274 - RNA, 19 nt, Artificial Sequence
  Synthetic
gaguuaaaguuccucguaa

SEQ ID NO: 2275 - RNA, 19 nt, Artificial Sequence
  Synthetic
aaagagagcugcaguugaa

SEQ ID NO: 2276 - RNA, 19 nt, Artificial Sequence
  Synthetic
aguuaaaguuccucguaau

SEQ ID NO: 2277 - RNA, 19 nt, Artificial Sequence
  Synthetic
guucaggauuguuuugaua

SEQ ID NO: 2278 - RNA, 19 nt, Artificial Sequence
  Synthetic
gcacugucauuuaaacaua

SEQ ID NO: 2279 - RNA, 19 nt, Artificial Sequence
  Synthetic
aggcaugauuauugggcca

SEQ ID NO: 2280 - RNA, 19 nt, Artificial Sequence
  Synthetic
gaaauagguguauggauau

SEQ ID NO: 2281 - RNA, 19 nt, Artificial Sequence
  Synthetic
guuggaagaacuugaagaa

SEQ ID NO: 2282 - RNA, 19 nt, Artificial Sequence
  Synthetic
gaugaagauaugacacuua

SEQ ID NO: 2283 - RNA, 19 nt, Artificial Sequence
  Synthetic
auaaauaauuccaguggga

SEQ ID NO: 2284 - RNA, 19 nt, Artificial Sequence
  Synthetic
ccaaggacaaauuaugaaa

SEQ ID NO: 2285 - RNA, 19 nt, Artificial Sequence
  Synthetic
gcauaccaguguuagcaaa

SEQ ID NO: 2286 - RNA, 19 nt, Artificial Sequence
  Synthetic
aagcuguucuuguguguua

SEQ ID NO: 2287 - RNA, 19 nt, Artificial Sequence
  Synthetic
cuggacauuuguaagaaua

SEQ ID NO: 2288 - RNA, 19 nt, Artificial Sequence
  Synthetic
agaacuugaagaaggacaa

SEQ ID NO: 2289 - RNA, 19 nt, Artificial Sequence
  Synthetic
acagaaauggcaugcuuua

SEQ ID NO: 2290 - RNA, 19 nt, Artificial Sequence
  Synthetic
cuuacaagguggacaggca

SEQ ID NO: 2291 - RNA, 19 nt, Artificial Sequence
  Synthetic
aagcauguguguuucuaaa

SEQ ID NO: 2292 - RNA, 19 nt, Artificial Sequence
  Synthetic
aguggaagcauguguguuu

SEQ ID NO: 2293 - RNA, 19 nt, Artificial Sequence
  Synthetic
agacaaagaugaagaugaa

SEQ ID NO: 2294 - RNA, 19 nt, Artificial Sequence
  Synthetic
guagagaaagagaggauua

SEQ ID NO: 2295 - RNA, 19 nt, Artificial Sequence
  Synthetic
ccucagaacuuuaguaaca

SEQ ID NO: 2296 - RNA, 19 nt, Artificial Sequence
  Synthetic
uaacagaagagaagguaua

SEQ ID NO: 2297 - RNA, 19 nt, Artificial Sequence
  Synthetic
aaguagaaacagagaacaa

SEQ ID NO: 2298 - RNA, 19 nt, Artificial Sequence
  Synthetic
ggaauuugaaggagaacaa

SEQ ID NO: 2299 - RNA, 19 nt, Artificial Sequence
  Synthetic
gggagaaauuggaauguuu

SEQ ID NO: 2300 - RNA, 19 nt, Artificial Sequence
  Synthetic
guaauuaaagugaggagaa

SEQ ID NO: 2301 - RNA, 19 nt, Artificial Sequence
  Synthetic
ggagaagaaagaagaaaca

SEQ ID NO: 2302 - RNA, 19 nt, Artificial Sequence
  Synthetic
caacaaaguuaggaaguuu

SEQ ID NO: 2303 - RNA, 19 nt, Artificial Sequence
  Synthetic
caaaugaaaugguagucaa

SEQ ID NO: 2304 - RNA, 19 nt, Artificial Sequence
  Synthetic
caagaaaggcgcuagaauu

SEQ ID NO: 2305 - RNA, 19 nt, Artificial Sequence
  Synthetic
agcaaaagaugaagacaaa

SEQ ID NO: 2306 - RNA, 19 nt, Artificial Sequence
  Synthetic
aggcauugguacagagcuu

SEQ ID NO: 2307 - RNA, 19 nt, Artificial Sequence
  Synthetic
gcaccaguguuauuggaaa

SEQ ID NO: 2308 - RNA, 19 nt, Artificial Sequence
  Synthetic
ggaagaagacucagaagca

SEQ ID NO: 2309 - RNA, 19 nt, Artificial Sequence
  Synthetic
gaagagaagguauaugaaa

SEQ ID NO: 2310 - RNA, 19 nt, Artificial Sequence
  Synthetic
guucaaggcuuuucggaga

SEQ ID NO: 2311 - RNA, 19 nt, Artificial Sequence
  Synthetic
ucagaaguuuggcgaaaua

SEQ ID NO: 2312 - RNA, 19 nt, Artificial Sequence
  Synthetic
cagucgaaaucuagugaau

SEQ ID NO: 2313 - RNA, 19 nt, Artificial Sequence
  Synthetic
gcgugaaaguguuacauau

SEQ ID NO: 2314 - RNA, 19 nt, Artificial Sequence
  Synthetic
ugaaugagguucuagaaau

SEQ ID NO: 2315 - RNA, 19 nt, Artificial Sequence
  Synthetic
gagaugaucgcuauggaaa

SEQ ID NO: 2316 - RNA, 19 nt, Artificial Sequence
  Synthetic
agaugaagacaaagaugaa

SEQ ID NO: 2317 - RNA, 19 nt, Artificial Sequence
  Synthetic
gaagaaagaagaaacaaga

SEQ ID NO: 2318 - RNA, 19 nt, Artificial Sequence
  Synthetic
ggugauugauugauugauu

SEQ ID NO: 2319 - RNA, 19 nt, Artificial Sequence
  Synthetic
auuagggaguucugggaaa

SEQ ID NO: 2320 - RNA, 19 nt, Artificial Sequence
  Synthetic
caaugaagaagaugaugaa

SEQ ID NO: 2321 - RNA, 19 nt, Artificial Sequence
  Synthetic
aagcaaaagaugaagacaa

SEQ ID NO: 2322 - RNA, 19 nt, Artificial Sequence
  Synthetic
gcucacagggagacaacaa

SEQ ID NO: 2323 - RNA, 19 nt, Artificial Sequence
  Synthetic
aagaaaggcuugugcagaa

SEQ ID NO: 2324 - RNA, 19 nt, Artificial Sequence
  Synthetic
gugcaaauauaaugggaca

SEQ ID NO: 2325 - RNA, 19 nt, Artificial Sequence
  Synthetic
ggagagagauugaugacuu

SEQ ID NO: 2326 - RNA, 19 nt, Artificial Sequence
  Synthetic
ccacaguccuucagaguuu

SEQ ID NO: 2327 - RNA, 19 nt, Artificial Sequence
  Synthetic
caaagaggauaaugagaga

SEQ ID NO: 2328 - RNA, 19 nt, Artificial Sequence
  Synthetic
agagauaucaggagagaga

SEQ ID NO: 2329 - RNA, 19 nt, Artificial Sequence
  Synthetic
gcacagggcugcagaaaau

SEQ ID NO: 2330 - RNA, 19 nt, Artificial Sequence
  Synthetic
ggaacaaacacuaaccuaa

SEQ ID NO: 2331 - RNA, 19 nt, Artificial Sequence
  Synthetic
ccuacauccaugagaauua

SEQ ID NO: 2332 - RNA, 19 nt, Artificial Sequence
  Synthetic
cagauggguucgugaguuu

SEQ ID NO: 2333 - RNA, 19 nt, Artificial Sequence
  Synthetic
ggaaacauggcaaggaauu

SEQ ID NO: 2334 - RNA, 19 nt, Artificial Sequence
  Synthetic
ucagaaucaaagaggauaa

SEQ ID NO: 2335 - RNA, 19 nt, Artificial Sequence
  Synthetic
uggaagagcuggucacuau

SEQ ID NO: 2336 - RNA, 19 nt, Artificial Sequence
  Synthetic
gggagagagugauuuauaa

SEQ ID NO: 2337 - RNA, 19 nt, Artificial Sequence
  Synthetic
ggauggaauuguagagaac

SEQ ID NO: 2338 - RNA, 19 nt, Artificial Sequence
  Synthetic
gggauggaauuguagagaa

SEQ ID NO: 2339 - RNA, 19 nt, Artificial Sequence
  Synthetic
gcagagagauaucaggaga

SEQ ID NO: 2340 - RNA, 19 nt, Artificial Sequence
  Synthetic
uguuagaggaggagacaga

SEQ ID NO: 2341 - RNA, 19 nt, Artificial Sequence
  Synthetic
gcagaaguccagaagguuu

SEQ ID NO: 2342 - RNA, 19 nt, Artificial Sequence
  Synthetic
agauaucaggagagagauu

SEQ ID NO: 2343 - RNA, 19 nt, Artificial Sequence
  Synthetic
ccgucaggcacgagaagaa

SEQ ID NO: 2344 - RNA, 19 nt, Artificial Sequence
  Synthetic
gggaaaaggugaaagucuu

SEQ ID NO: 2345 - RNA, 19 nt, Artificial Sequence
  Synthetic
gaaucaaagaggauaauga

SEQ ID NO: 2346 - RNA, 19 nt, Artificial Sequence
  Synthetic
caacagaucaagaacauuu

SEQ ID NO: 2347 - RNA, 19 nt, Artificial Sequence
  Synthetic
ccagaguguuagaggagga

SEQ ID NO: 2348 - RNA, 19 nt, Artificial Sequence
  Synthetic
gugugaaguuugucaauga

SEQ ID NO: 2349 - RNA, 19 nt, Artificial Sequence
  Synthetic
caacaugccaggugacauu

SEQ ID NO: 2350 - RNA, 19 nt, Artificial Sequence
  Synthetic
ucaagaacauuuuguggua

SEQ ID NO: 2351 - RNA, 19 nt, Artificial Sequence
  Synthetic
cagcauggguugaguguac

SEQ ID NO: 2352 - RNA, 19 nt, Artificial Sequence
  Synthetic
cagaagaaguccaaccuga

SEQ ID NO: 2353 - RNA, 19 nt, Artificial Sequence
  Synthetic
ggagaaaacuggaggaaaa

SEQ ID NO: 2354 - RNA, 19 nt, Artificial Sequence
  Synthetic
ugacagaccaggagaauaa

SEQ ID NO: 2355 - RNA, 19 nt, Artificial Sequence
  Synthetic
ggaaaugaaccuagaaaca

SEQ ID NO: 2356 - RNA, 19 nt, Artificial Sequence
  Synthetic
agaaauggcaguagagcua

SEQ ID NO: 2357 - RNA, 19 nt, Artificial Sequence
  Synthetic
gaauagauacugugaacua

SEQ ID NO: 2358 - RNA, 19 nt, Artificial Sequence
  Synthetic
caguagagcuagaagauca

SEQ ID NO: 2359 - RNA, 19 nt, Artificial Sequence
  Synthetic
cauuaaugcugcugaauau

SEQ ID NO: 2360 - RNA, 19 nt, Artificial Sequence
  Synthetic
gcaacuuggcagagagaau

SEQ ID NO: 2361 - RNA, 19 nt, Artificial Sequence
  Synthetic
cagaguaacuucacauaaa

SEQ ID NO: 2362 - RNA, 19 nt, Artificial Sequence
  Synthetic
gcaggaaauaugugagcaa

SEQ ID NO: 2363 - RNA, 19 nt, Artificial Sequence
  Synthetic
gcauagaaagaaugaagaa

SEQ ID NO: 2364 - RNA, 19 nt, Artificial Sequence
  Synthetic
ggagcaacuugaauagaua

SEQ ID NO: 2365 - RNA, 19 nt, Artificial Sequence
  Synthetic
gagcagacuuucuaacaua

SEQ ID NO: 2366 - RNA, 19 nt, Artificial Sequence
  Synthetic
gauaauagcgugucagaga

SEQ ID NO: 2367 - RNA, 19 nt, Artificial Sequence
  Synthetic
ugagaaggaucgaggugaa

SEQ ID NO: 2368 - RNA, 19 nt, Artificial Sequence
  Synthetic
ggaauaugauuauggcuuu

SEQ ID NO: 2369 - RNA, 19 nt, Artificial Sequence
  Synthetic
gggagagcauuaaggauuu

SEQ ID NO: 2370 - RNA, 19 nt, Artificial Sequence
  Synthetic
cgggagagcauuaaggauu

SEQ ID NO: 2371 - RNA, 19 nt, Artificial Sequence
  Synthetic
auaaauaagccugggaaua

SEQ ID NO: 2372 - RNA, 19 nt, Artificial Sequence
  Synthetic
gggcaaauguaccagaaga

SEQ ID NO: 2373 - RNA, 19 nt, Artificial Sequence
  Synthetic
ccaagaggcuaauacuaaa

SEQ ID NO: 2374 - RNA, 19 nt, Artificial Sequence
  Synthetic
gaggauaccuuaaagugaa

SEQ ID NO: 2375 - RNA, 19 nt, Artificial Sequence
  Synthetic
gcauuaaggauuuggcuga

SEQ ID NO: 2376 - RNA, 19 nt, Artificial Sequence
  Synthetic
ggaguugaaugaugaagaa

SEQ ID NO: 2377 - RNA, 19 nt, Artificial Sequence
  Synthetic
ucaaaguacaggaggccaa

SEQ ID NO: 2378 - RNA, 19 nt, Artificial Sequence
  Synthetic
acaacaacaucucaaguaa

SEQ ID NO: 2379 - RNA, 19 nt, Artificial Sequence
  Synthetic
agucaugauuccaguguuu

SEQ ID NO: 2380 - RNA, 19 nt, Artificial Sequence
  Synthetic
ggccaaacacagaacuaaa

SEQ ID NO: 2381 - RNA, 19 nt, Artificial Sequence
  Synthetic
uaacuuaccaagaggcuaa

SEQ ID NO: 2382 - RNA, 19 nt, Artificial Sequence
  Synthetic
uguguagacuucugaauaa

SEQ ID NO: 2383 - RNA, 19 nt, Artificial Sequence
  Synthetic
aggaagagaugaagaacaa

SEQ ID NO: 2384 - RNA, 19 nt, Artificial Sequence
  Synthetic
caauagaacuguagaagau

SEQ ID NO: 2385 - RNA, 19 nt, Artificial Sequence
  Synthetic
ccgagaaaguggaggagau

SEQ ID NO: 2386 - RNA, 19 nt, Artificial Sequence
  Synthetic
acagaaaucucuugcuaaa

SEQ ID NO: 2387 - RNA, 19 nt, Artificial Sequence
  Synthetic
gaaaaugaucgaagagaaa

SEQ ID NO: 2388 - RNA, 19 nt, Artificial Sequence
  Synthetic
agacagauaugcugaacua

SEQ ID NO: 2389 - RNA, 19 nt, Artificial Sequence
  Synthetic
caaagaagcuguuggacca

SEQ ID NO: 2390 - RNA, 19 nt, Artificial Sequence
  Synthetic
uugaaaacccugagaaaua

SEQ ID NO: 2391 - RNA, 19 nt, Artificial Sequence
  Synthetic
agaagauguugcagaauuu

SEQ ID NO: 2392 - RNA, 19 nt, Artificial Sequence
  Synthetic
cgauggaagaugugaauga

SEQ ID NO: 2393 - RNA, 19 nt, Artificial Sequence
  Synthetic
cggcagacgcugacagaga

SEQ ID NO: 2394 - RNA, 19 nt, Artificial Sequence
  Synthetic
gaaaggacauggaugagaa

SEQ ID NO: 2395 - RNA, 19 nt, Artificial Sequence
  Synthetic
ggagcaaguaauugggauu

SEQ ID NO: 2396 - RNA, 19 nt, Artificial Sequence
  Synthetic
gaguuggaauagaggaaaa

SEQ ID NO: 2397 - RNA, 19 nt, Artificial Sequence
  Synthetic
gcaacuagacaccgcgaaa

SEQ ID NO: 2398 - RNA, 19 nt, Artificial Sequence
  Synthetic
ggagaugaggguuggguuu

SEQ ID NO: 2399 - RNA, 19 nt, Artificial Sequence
  Synthetic
uguagaagauguugcagaa

SEQ ID NO: 2400 - RNA, 19 nt, Artificial Sequence
  Synthetic
cgagaaaguggaggagaua

SEQ ID NO: 2401 - RNA, 19 nt, Artificial Sequence
  Synthetic
uaaugaaagccaauggaaa

SEQ ID NO: 2402 - RNA, 19 nt, Artificial Sequence
  Synthetic
ugacacacguucagaagaa

SEQ ID NO: 2403 - RNA, 19 nt, Artificial Sequence
  Synthetic
ggacagaccucucagccaa

SEQ ID NO: 2404 - RNA, 19 nt, Artificial Sequence
  Synthetic
ccgaguuggaauagaggaa

SEQ ID NO: 2405 - RNA, 19 nt, Artificial Sequence
  Synthetic
uggaggagauaguggccaa

SEQ ID NO: 2406 - RNA, 19 nt, Artificial Sequence
  Synthetic
aagcggagccucagugaua

SEQ ID NO: 2407 - RNA, 19 nt, Artificial Sequence
  Synthetic
cugcaaugcugaacuuuaa

SEQ ID NO: 2408 - RNA, 19 nt, Artificial Sequence
  Synthetic
gaacuuuaaucuucagcaa

SEQ ID NO: 2409 - RNA, 19 nt, Artificial Sequence
  Synthetic
ugaaaaugaucgaagagaa

SEQ ID NO: 2410 - RNA, 19 nt, Artificial Sequence
  Synthetic
uugaaaugauugagaacca

SEQ ID NO: 2411 - RNA, 19 nt, Artificial Sequence
  Synthetic
gcucaauagaacuguagaa

SEQ ID NO: 2412 - RNA, 19 nt, Artificial Sequence
  Synthetic
acauggagguugaugaaaa

SEQ ID NO: 2413 - RNA, 19 nt, Artificial Sequence
  Synthetic
gagaguaauuguuguguaa

SEQ ID NO: 2414 - RNA, 19 nt, Artificial Sequence
  Synthetic
agacauuaccagagccaaa

SEQ ID NO: 2415 - RNA, 19 nt, Artificial Sequence
  Synthetic
gaaauaaacugguucacua

SEQ ID NO: 2416 - RNA, 19 nt, Artificial Sequence
  Synthetic
ugagaagacuggagagagu

SEQ ID NO: 2417 - RNA, 19 nt, Artificial Sequence
  Synthetic
ccaaauauucuacgacuua

SEQ ID NO: 2418 - RNA, 19 nt, Artificial Sequence
  Synthetic
guacauaaagccugaauga

SEQ ID NO: 2419 - RNA, 19 nt, Artificial Sequence
  Synthetic
ggucagaggaaucgugaga

SEQ ID NO: 2420 - RNA, 19 nt, Artificial Sequence
  Synthetic
gcacagaauacuaaacuga

SEQ ID NO: 2421 - RNA, 19 nt, Artificial Sequence
  Synthetic
gcacagcacuaaagcauga

SEQ ID NO: 2422 - RNA, 19 nt, Artificial Sequence
  Synthetic
ucacaacaauggauagaau

SEQ ID NO: 2423 - RNA, 19 nt, Artificial Sequence
  Synthetic
gcauagauccaguaaugua

SEQ ID NO: 2424 - RNA, 19 nt, Artificial Sequence
  Synthetic
guauaugacaauuggccaa

SEQ ID NO: 2425 - RNA, 19 nt, Artificial Sequence
  Synthetic
guaaauagcacuaaacguu

SEQ ID NO: 2426 - RNA, 19 nt, Artificial Sequence
  Synthetic
guuaauuuguggacaguca

SEQ ID NO: 2427 - RNA, 19 nt, Artificial Sequence
  Synthetic
gagcagaguuuuaaaauga

SEQ ID NO: 2428 - RNA, 19 nt, Artificial Sequence
  Synthetic
cauaaagccugaaugauga

SEQ ID NO: 2429 - RNA, 19 nt, Artificial Sequence
  Synthetic
gauauuagugcuugcaauu

SEQ ID NO: 2430 - RNA, 19 nt, Artificial Sequence
  Synthetic
aaacaacagugaugcauuu

SEQ ID NO: 2431 - RNA, 19 nt, Artificial Sequence
  Synthetic
gaaagaauuacgucgcuua

SEQ ID NO: 2432 - RNA, 19 nt, Artificial Sequence
  Synthetic
guaacugaguguuuguuua

SEQ ID NO: 2433 - RNA, 19 nt, Artificial Sequence
  Synthetic
agaagacuggagagaguaa

SEQ ID NO: 2434 - RNA, 19 nt, Artificial Sequence
  Synthetic
ggucagcaguccaaauauu

SEQ ID NO: 2435 - RNA, 19 nt, Artificial Sequence
  Synthetic
cagcguuguuuaaauguaa

SEQ ID NO: 2436 - RNA, 19 nt, Artificial Sequence
  Synthetic
guaaacacauggaacugaa

SEQ ID NO: 2437 - RNA, 19 nt, Artificial Sequence
  Synthetic
ugucacauuaggagcauua

SEQ ID NO: 2438 - RNA, 19 nt, Artificial Sequence
  Synthetic
ggugagagcugcauagauc

SEQ ID NO: 2439 - RNA, 19 nt, Artificial Sequence
  Synthetic
caaagcauguauaugacaa

SEQ ID NO: 2440 - RNA, 19 nt, Artificial Sequence
  Synthetic
cgacauugcuucagaaacc

SEQ ID NO: 2441 - RNA, 19 nt, Artificial Sequence
  Synthetic
gaguaauuguuguguaauc

SEQ ID NO: 2442 - RNA, 19 nt, Artificial Sequence
  Synthetic
ugugugguaucuagaaaua

SEQ ID NO: 2443 - RNA, 19 nt, Artificial Sequence
  Synthetic
ggaaacgacucucggauua

SEQ ID NO: 2444 - RNA, 19 nt, Artificial Sequence
  Synthetic
agacaauggagaagggcuu

SEQ ID NO: 2445 - RNA, 19 nt, Artificial Sequence
  Synthetic
cugaagugacugagacaau

SEQ ID NO: 2446 - RNA, 19 nt, Artificial Sequence
  Synthetic
gaacagcuacagagggauu

SEQ ID NO: 2447 - RNA, 19 nt, Artificial Sequence
  Synthetic
uggaacagcuacagaggga

SEQ ID NO: 2448 - RNA, 19 nt, Artificial Sequence
  Synthetic
ugacugagacaauggagaa

SEQ ID NO: 2449 - RNA, 19 nt, Artificial Sequence
  Synthetic
ggcccuggcagaugggaaa

SEQ ID NO: 2450 - RNA, 19 nt, Artificial Sequence
  Synthetic
gggaaacgacucucggauu

SEQ ID NO: 2451 - RNA, 19 nt, Artificial Sequence
  Synthetic
cuacagagggauuacgaga

SEQ ID NO: 2452 - RNA, 19 nt, Artificial Sequence
  Synthetic
gaaggugcuacuagaagaa

SEQ ID NO: 2453 - RNA, 19 nt, Artificial Sequence
  Synthetic
agaaggugcuacuagaaga

SEQ ID NO: 2454 - RNA, 19 nt, Artificial Sequence
  Synthetic
agcucaaccuaguggucaa

SEQ ID NO: 2455 - RNA, 19 nt, Artificial Sequence
  Synthetic
ggagaaggugcuacuagaa

SEQ ID NO: 2456 - RNA, 19 nt, Artificial Sequence
  Synthetic
uagaagaaggcgaggccca

SEQ ID NO: 2457 - RNA, 19 nt, Artificial Sequence
  Synthetic
uggagaaggugcuacuaga

SEQ ID NO: 2458 - RNA, 19 nt, Artificial Sequence
  Synthetic
cagcugaucuccaaagucu

SEQ ID NO: 2459 - RNA, 19 nt, Artificial Sequence
  Synthetic
acuccaagcucaaccuagu

SEQ ID NO: 2460 - RNA, 19 nt, Artificial Sequence
  Synthetic
gaaacgacucucggauuau

SEQ ID NO: 2461 - RNA, 19 nt, Artificial Sequence
  Synthetic
gcagaugggaaacgacucu

SEQ ID NO: 2462 - RNA, 19 nt, Artificial Sequence
  Synthetic
gagaaggugcuacuagaag

SEQ ID NO: 2463 - RNA, 19 nt, Artificial Sequence
  Synthetic
aaacgacucucggauuaua

SEQ ID NO: 2464 - RNA, 19 nt, Artificial Sequence
  Synthetic
ucuggcagcugaucuccaa

SEQ ID NO: 2465 - RNA, 19 nt, Artificial Sequence
  Synthetic
ugaagugacugagacaaug

SEQ ID NO: 2466 - RNA, 19 nt, Artificial Sequence
  Synthetic
gcugaucuccaaagucuug

SEQ ID NO: 2467 - RNA, 19 nt, Artificial Sequence
  Synthetic
ggcagcugaucuccaaagu

SEQ ID NO: 2468 - RNA, 19 nt, Artificial Sequence
  Synthetic
gaagugacugagacaaugg

SEQ ID NO: 2469 - RNA, 19 nt, Artificial Sequence
  Synthetic
caacuccaagcucaaccua

SEQ ID NO: 2470 - RNA, 19 nt, Artificial Sequence
  Synthetic
ggaugaaccuggagcuuua

SEQ ID NO: 2471 - RNA, 19 nt, Artificial Sequence
  Synthetic
gggaagaagguccgcguua

SEQ ID NO: 2472 - RNA, 19 nt, Artificial Sequence
  Synthetic
gauagaugcuuguuuguaa

SEQ ID NO: 2473 - RNA, 19 nt, Artificial Sequence
  Synthetic
gaagaagguccgcguuaaa

SEQ ID NO: 2474 - RNA, 19 nt, Artificial Sequence
  Synthetic
ggaagaagguccgcguuaa

SEQ ID NO: 2475 - RNA, 19 nt, Artificial Sequence
  Synthetic
cugaagaagugguacacga

SEQ ID NO: 2476 - RNA, 19 nt, Artificial Sequence
  Synthetic
aagaagugguacacgauuu

SEQ ID NO: 2477 - RNA, 19 nt, Artificial Sequence
  Synthetic
ugaucgagguuguuugcaa

SEQ ID NO: 2478 - RNA, 19 nt, Artificial Sequence
  Synthetic
cuaggaugaucgagguugu

SEQ ID NO: 2479 - RNA, 19 nt, Artificial Sequence
  Synthetic
gggaugaaccuggagcuuu

SEQ ID NO: 2480 - RNA, 19 nt, Artificial Sequence
  Synthetic
gcaacacggaugauaccau

SEQ ID NO: 2481 - RNA, 19 nt, Artificial Sequence
  Synthetic
ugaagaagugguacacgau

SEQ ID NO: 2482 - RNA, 19 nt, Artificial Sequence
  Synthetic
gaaccuggagcuuuauuau

SEQ ID NO: 2483 - RNA, 19 nt, Artificial Sequence
  Synthetic
uuaaaugcaacacggauga

SEQ ID NO: 2484 - RNA, 19 nt, Artificial Sequence
  Synthetic
ccuggagcuuuauuaucaa

SEQ ID NO: 2485 - RNA, 19 nt, Artificial Sequence
  Synthetic
gaagaagugguacacgauu

SEQ ID NO: 2486 - RNA, 19 nt, Artificial Sequence
  Synthetic
gguacccguuggaacaaga

SEQ ID NO: 2487 - RNA, 19 nt, Artificial Sequence
  Synthetic
ggauagaugcuuguuugua

SEQ ID NO: 2488 - RNA, 19 nt, Artificial Sequence
  Synthetic
aagauuguccugaagaagu

SEQ ID NO: 2489 - RNA, 19 nt, Artificial Sequence
  Synthetic
accuggagcuuuauuauca

SEQ ID NO: 2490 - RNA, 19 nt, Artificial Sequence
  Synthetic
aaaugcaacacggaugaua

SEQ ID NO: 2491 - RNA, 19 nt, Artificial Sequence
  Synthetic
ugggauagaugcuuguuug

SEQ ID NO: 2492 - RNA, 19 nt, Artificial Sequence
  Synthetic
agauuguccugaagaagug

SEQ ID NO: 2493 - RNA, 19 nt, Artificial Sequence
  Synthetic
ugaaccuggagcuuuauua

SEQ ID NO: 2494 - RNA, 19 nt, Artificial Sequence
  Synthetic
gaccuuaagaagcugauug

SEQ ID NO: 2495 - RNA, 19 nt, Artificial Sequence
  Synthetic
agaagguccgcguuaaaug

SEQ ID NO: 2496 - RNA, 19 nt, Artificial Sequence
  Synthetic
aagaagguccgcguuaaau

SEQ ID NO: 2497 - RNA, 19 nt, Artificial Sequence
  Synthetic
gaagguccgcguuaaaugc

SEQ ID NO: 2498 - RNA, 19 nt, Artificial Sequence
  Synthetic
gaugaucgagguuguuugc

SEQ ID NO: 2499 - RNA, 19 nt, Artificial Sequence
  Synthetic
ggaugaauauggagaaaca

SEQ ID NO: 2500 - RNA, 19 nt, Artificial Sequence
  Synthetic
ucaaauagcaucaaggaaa

SEQ ID NO: 2501 - RNA, 19 nt, Artificial Sequence
  Synthetic
gauuauggcucaucagaaa

SEQ ID NO: 2502 - RNA, 19 nt, Artificial Sequence
  Synthetic
gugaagcgauuaagagaaa

SEQ ID NO: 2503 - RNA, 19 nt, Artificial Sequence
  Synthetic
cugcagaugaugagcgaaa

SEQ ID NO: 2504 - RNA, 19 nt, Artificial Sequence
  Synthetic
ggacaaauugggaagagua

SEQ ID NO: 2505 - RNA, 19 nt, Artificial Sequence
  Synthetic
ggacagaaagauuaagaau

SEQ ID NO: 2506 - RNA, 19 nt, Artificial Sequence
  Synthetic
agaaaugacuauaugggaa

SEQ ID NO: 2507 - RNA, 19 nt, Artificial Sequence
  Synthetic
cuuggaaaguggagaauau

SEQ ID NO: 2508 - RNA, 19 nt, Artificial Sequence
  Synthetic
gaacauaugcagaagaaaa

SEQ ID NO: 2509 - RNA, 19 nt, Artificial Sequence
  Synthetic
aagaagaacaggaggugaa

SEQ ID NO: 2510 - RNA, 19 nt, Artificial Sequence
  Synthetic
ccagaaaucuacugccuua

SEQ ID NO: 2511 - RNA, 19 nt, Artificial Sequence
  Synthetic
gcuuagagaaugucauaaa

SEQ ID NO: 2512 - RNA, 19 nt, Artificial Sequence
  Synthetic
gggaagaguauaugcagua

SEQ ID NO: 2513 - RNA, 19 nt, Artificial Sequence
  Synthetic
gguccugguugaagguaaa

SEQ ID NO: 2514 - RNA, 19 nt, Artificial Sequence
  Synthetic
caaauagcaucaaggaaau

SEQ ID NO: 2515 - RNA, 19 nt, Artificial Sequence
  Synthetic
cuauggaauuugugaagua

SEQ ID NO: 2516 - RNA, 19 nt, Artificial Sequence
  Synthetic
ggagaaaacaagaaaacaa

SEQ ID NO: 2517 - RNA, 19 nt, Artificial Sequence
  Synthetic
uagagguacuaguggaaua

SEQ ID NO: 2518 - RNA, 19 nt, Artificial Sequence
  Synthetic
acaaaguccuacagaguau

SEQ ID NO: 2519 - RNA, 19 nt, Artificial Sequence
  Synthetic
aggaagauauaaagaguca

SEQ ID NO: 2520 - RNA, 19 nt, Artificial Sequence
  Synthetic
auaaacaacugcagaaaga

SEQ ID NO: 2521 - RNA, 19 nt, Artificial Sequence
  Synthetic
gcugagauguggcgaagaa

SEQ ID NO: 2522 - RNA, 19 nt, Artificial Sequence
  Synthetic
ccaaagaagaggucacaau

SEQ ID NO: 2523 - RNA, 19 nt, Artificial Sequence
  Synthetic
ccaaauggcuuuucauauu

SEQ ID NO: 2524 - RNA, 19 nt, Artificial Sequence
  Synthetic
cuauaugggaagaggaaaa

SEQ ID NO: 2525 - RNA, 19 nt, Artificial Sequence
  Synthetic
uuucaaaaguggagagaca

SEQ ID NO: 2526 - RNA, 19 nt, Artificial Sequence
  Synthetic
caauauggacagaaagauu

SEQ ID NO: 2527 - RNA, 19 nt, Artificial Sequence
  Synthetic
gguacugagaggauggaaa

SEQ ID NO: 2528 - RNA, 19 nt, Artificial Sequence
  Synthetic
ccgaagacagguugggcaa

SEQ ID NO: 2529 - RNA, 19 nt, Artificial Sequence
  Synthetic
ggccaauaaucaagacaaa

SEQ ID NO: 2530 - RNA, 19 nt, Artificial Sequence
  Synthetic
caugagaacuucaggaaaa

SEQ ID NO: 2531 - RNA, 19 nt, Artificial Sequence
  Synthetic
uugaagagcugaagggaca

SEQ ID NO: 2532 - RNA, 19 nt, Artificial Sequence
  Synthetic
ggguagaugacaaggugaa

SEQ ID NO: 2533 - RNA, 19 nt, Artificial Sequence
  Synthetic
ccgcgaagaugcagcucaa

SEQ ID NO: 2534 - RNA, 19 nt, Artificial Sequence
  Synthetic
gccaaggucugcagagaau

SEQ ID NO: 2535 - RNA, 19 nt, Artificial Sequence
  Synthetic
gaagcagaccauugggaau

SEQ ID NO: 2536 - RNA, 19 nt, Artificial Sequence
  Synthetic
gcaugagaacuucaggaaa

SEQ ID NO: 2537 - RNA, 19 nt, Artificial Sequence
  Synthetic
agaccuuggaugugguuua

SEQ ID NO: 2538 - RNA, 19 nt, Artificial Sequence
  Synthetic
gcugaagggacaagaaguu

SEQ ID NO: 2539 - RNA, 19 nt, Artificial Sequence
  Synthetic
cuaugaacuugauggacga

SEQ ID NO: 2540 - RNA, 19 nt, Artificial Sequence
  Synthetic
cuaaaaugcuucaguacuu

SEQ ID NO: 2541 - RNA, 19 nt, Artificial Sequence
  Synthetic
ggaugugguuuaauuguuu

SEQ ID NO: 2542 - RNA, 19 nt, Artificial Sequence
  Synthetic
ccaauaaucaagacaaacu

SEQ ID NO: 2543 - RNA, 19 nt, Artificial Sequence
  Synthetic
cggcccagcaugagaacuu

SEQ ID NO: 2544 - RNA, 19 nt, Artificial Sequence
  Synthetic
uagaugacaaggugaauuu

SEQ ID NO: 2545 - RNA, 19 nt, Artificial Sequence
  Synthetic
cccugaagacagagcaaaa

SEQ ID NO: 2546 - RNA, 19 nt, Artificial Sequence
  Synthetic
cagcucaagccgauggaga

SEQ ID NO: 2547 - RNA, 19 nt, Artificial Sequence
  Synthetic
ccgagaugcugaacaaagu

SEQ ID NO: 2548 - RNA, 19 nt, Artificial Sequence
  Synthetic
gggauuugaggauggauca

SEQ ID NO: 2549 - RNA, 19 nt, Artificial Sequence
  Synthetic
gguuucugucuguaaguua

SEQ ID NO: 2550 - RNA, 19 nt, Artificial Sequence
  Synthetic
guuucugucuguaaguuaa

SEQ ID NO: 2551 - RNA, 19 nt, Artificial Sequence
  Synthetic
ccuuggaugugguuuaauu

SEQ ID NO: 2552 - RNA, 19 nt, Artificial Sequence
  Synthetic
ggagggacuuugcugauuu

SEQ ID NO: 2553 - RNA, 19 nt, Artificial Sequence
  Synthetic
aagcagaccauugggaauu

SEQ ID NO: 2554 - RNA, 19 nt, Artificial Sequence
  Synthetic
acgcaguggccaauaauca

SEQ ID NO: 2555 - RNA, 19 nt, Artificial Sequence
  Synthetic
uuaacaacguggauggcca

SEQ ID NO: 2556 - RNA, 19 nt, Artificial Sequence
  Synthetic
cagaggacacccugcugaa

SEQ ID NO: 2557 - RNA, 19 nt, Artificial Sequence
  Synthetic
cugaagggacaagaaguua

SEQ ID NO: 2558 - RNA, 19 nt, Artificial Sequence
  Synthetic
ggugugagcuucagauggu

SEQ ID NO: 2559 - RNA, 19 nt, Artificial Sequence
  Synthetic
cagcauagcuugucaauaa

SEQ ID NO: 2560 - RNA, 19 nt, Artificial Sequence
  Synthetic
gaacagaagaggaagaaaa

SEQ ID NO: 2561 - RNA, 19 nt, Artificial Sequence
  Synthetic
cagcaaugccuguggaaca

SEQ ID NO: 2562 - RNA, 19 nt, Artificial Sequence
  Synthetic
uggugaaacuagugaugaa

SEQ ID NO: 2563 - RNA, 19 nt, Artificial Sequence
  Synthetic
ggcaauucguugauguaua

SEQ ID NO: 2564 - RNA, 19 nt, Artificial Sequence
  Synthetic
auucagaacagaagaggaa

SEQ ID NO: 2565 - RNA, 19 nt, Artificial Sequence
  Synthetic
cugaagaacgagccagaua

SEQ ID NO: 2566 - RNA, 19 nt, Artificial Sequence
  Synthetic
ccugaugaacuaagauuua

SEQ ID NO: 2567 - RNA, 19 nt, Artificial Sequence
  Synthetic
ccaauuaaccauggugaaa

SEQ ID NO: 2568 - RNA, 19 nt, Artificial Sequence
  Synthetic
gaacuaagauuuaaugcga

SEQ ID NO: 2569 - RNA, 19 nt, Artificial Sequence
  Synthetic
ccauagaaguuugcaagaa

SEQ ID NO: 2570 - RNA, 19 nt, Artificial Sequence
  Synthetic
caguauauuucaugaagca

SEQ ID NO: 2571 - RNA, 19 nt, Artificial Sequence
  Synthetic
aaauaaaaucucagggaca

SEQ ID NO: 2572 - RNA, 19 nt, Artificial Sequence
  Synthetic
gaaguuugcaagaaguuua

SEQ ID NO: 2573 - RNA, 19 nt, Artificial Sequence
  Synthetic
accaaguauagaugagaaa

SEQ ID NO: 2574 - RNA, 19 nt, Artificial Sequence
  Synthetic
gcgcgacccugaugaacua

SEQ ID NO: 2575 - RNA, 19 nt, Artificial Sequence
  Synthetic
uggaacaauuggacugauu

SEQ ID NO: 2576 - RNA, 19 nt, Artificial Sequence
  Synthetic
ucagaacagaagaggaaga

SEQ ID NO: 2577 - RNA, 19 nt, Artificial Sequence
  Synthetic
gucaaugagcccugaagaa

SEQ ID NO: 2578 - RNA, 19 nt, Artificial Sequence
  Synthetic
caaguauagaugagaaagu

SEQ ID NO: 2579 - RNA, 19 nt, Artificial Sequence
  Synthetic
caauaauggaaacaccaaa

SEQ ID NO: 2580 - RNA, 19 nt, Artificial Sequence
  Synthetic
gcacuuugaaucuggauca

SEQ ID NO: 2581 - RNA, 19 nt, Artificial Sequence
  Synthetic
acaauaaagacaagaugca

SEQ ID NO: 2582 - RNA, 19 nt, Artificial Sequence
  Synthetic
gcaauucguugauguauau

SEQ ID NO: 2583 - RNA, 19 nt, Artificial Sequence
  Synthetic
guauagaugagaaaguaga

SEQ ID NO: 2584 - RNA, 19 nt, Artificial Sequence
  Synthetic
caccaaguauagaugagaa

SEQ ID NO: 2585 - RNA, 19 nt, Artificial Sequence
  Synthetic
gaacaauuggacugauuca

SEQ ID NO: 2586 - RNA, 19 nt, Artificial Sequence
  Synthetic
ucguugauguauauggaau

SEQ ID NO: 2587 - RNA, 19 nt, Artificial Sequence
  Synthetic
ugaaacuagugaugaaacu

SEQ ID NO: 2588 - RNA, 19 nt, Artificial Sequence
  Synthetic
agacugaggcaccaaguau

SEQ ID NO: 2589 - RNA, 19 nt, Artificial Sequence
  Synthetic
guuuagagccugagaauuu

SEQ ID NO: 2590 - RNA, 19 nt, Artificial Sequence
  Synthetic
gcagaagauagcagaguua

SEQ ID NO: 2591 - RNA, 19 nt, Artificial Sequence
  Synthetic
ggauacagaucaagguaau

SEQ ID NO: 2592 - RNA, 19 nt, Artificial Sequence
  Synthetic
gcaaagaaagcucaggaaa

SEQ ID NO: 2593 - RNA, 19 nt, Artificial Sequence
  Synthetic
ugaagaagaaguacagaaa

SEQ ID NO: 2594 - RNA, 19 nt, Artificial Sequence
  Synthetic
guacagugaaggugaaauu

SEQ ID NO: 2595 - RNA, 19 nt, Artificial Sequence
  Synthetic
guuaauaccacuaguagaa

SEQ ID NO: 2596 - RNA, 19 nt, Artificial Sequence
  Synthetic
gcuuauugaagaagaagua

SEQ ID NO: 2597 - RNA, 19 nt, Artificial Sequence
  Synthetic
guagaaaaggcaaaagaaa

SEQ ID NO: 2598 - RNA, 19 nt, Artificial Sequence
  Synthetic
gagcccaaguagaagaaau

SEQ ID NO: 2599 - RNA, 19 nt, Artificial Sequence
  Synthetic
gcacaaacgauauuccuua

SEQ ID NO: 2600 - RNA, 19 nt, Artificial Sequence
  Synthetic
uagcagaguuacaaagaca

SEQ ID NO: 2601 - RNA, 19 nt, Artificial Sequence
  Synthetic
uaaagaacuuagagcaaca

SEQ ID NO: 2602 - RNA, 19 nt, Artificial Sequence
  Synthetic
caaagaaagcucaggaaac

SEQ ID NO: 2603 - RNA, 19 nt, Artificial Sequence
  Synthetic
gauuaaacugguugucuua

SEQ ID NO: 2604 - RNA, 19 nt, Artificial Sequence
  Synthetic
ccgaggagcccaaguagaa

SEQ ID NO: 2605 - RNA, 19 nt, Artificial Sequence
  Synthetic
gaguuuagagccugagaau

SEQ ID NO: 2606 - RNA, 19 nt, Artificial Sequence
  Synthetic
agccauagugaguguguua

SEQ ID NO: 2607 - RNA, 19 nt, Artificial Sequence
  Synthetic
gaggaggaacccauggaua

SEQ ID NO: 2608 - RNA, 19 nt, Artificial Sequence
  Synthetic
agaaggaccgauugauuua

SEQ ID NO: 2609 - RNA, 19 nt, Artificial Sequence
  Synthetic
gagcaauucagaugugauu

SEQ ID NO: 2610 - RNA, 19 nt, Artificial Sequence
  Synthetic
guuaagugcuauucaguca

SEQ ID NO: 2611 - RNA, 19 nt, Artificial Sequence
  Synthetic
agcccaaguagaagaaaua

SEQ ID NO: 2612 - RNA, 19 nt, Artificial Sequence
  Synthetic
ucagaugcuuauugaagaa

SEQ ID NO: 2613 - RNA, 19 nt, Artificial Sequence
  Synthetic
ugauauaugagcagaagau

SEQ ID NO: 2614 - RNA, 19 nt, Artificial Sequence
  Synthetic
gagaaggaccgauugauuu

SEQ ID NO: 2615 - RNA, 19 nt, Artificial Sequence
  Synthetic
agaugugauucgacaagua

SEQ ID NO: 2616 - RNA, 19 nt, Artificial Sequence
  Synthetic
caguaaggccugucauaga

SEQ ID NO: 2617 - RNA, 19 nt, Artificial Sequence
  Synthetic
gaugcuuauugaagaagaa

SEQ ID NO: 2618 - RNA, 19 nt, Artificial Sequence
  Synthetic
gauacgaagacaucagcaa

SEQ ID NO: 2619 - RNA, 19 nt, Artificial Sequence
  Synthetic
gggcaaaucaugagaauaa

SEQ ID NO: 2620 - RNA, 19 nt, Artificial Sequence
  Synthetic
agaaagaccugcugaauuu

SEQ ID NO: 2621 - RNA, 19 nt, Artificial Sequence
  Synthetic
caacagggauauuaugaua

SEQ ID NO: 2622 - RNA, 19 nt, Artificial Sequence
  Synthetic
cgagcaaggagaagacaaa

SEQ ID NO: 2623 - RNA, 19 nt, Artificial Sequence
  Synthetic
gcaaagaaguauggguuau

SEQ ID NO: 2624 - RNA, 19 nt, Artificial Sequence
  Synthetic
aagaagaaguagugagucu

SEQ ID NO: 2625 - RNA, 19 nt, Artificial Sequence
  Synthetic
ggcacagacuucaggcaaa

SEQ ID NO: 2626 - RNA, 19 nt, Artificial Sequence
  Synthetic
ggaccuaacuguggaagaa

SEQ ID NO: 2627 - RNA, 19 nt, Artificial Sequence
  Synthetic
ggcaaagaaguauggguua

SEQ ID NO: 2628 - RNA, 19 nt, Artificial Sequence
  Synthetic
ucacagagauuacaguaua

SEQ ID NO: 2629 - RNA, 19 nt, Artificial Sequence
  Synthetic
gaucggaauuggauguaau

SEQ ID NO: 2630 - RNA, 19 nt, Artificial Sequence
  Synthetic
ugggaaucuuagucggaaa

SEQ ID NO: 2631 - RNA, 19 nt, Artificial Sequence
  Synthetic
uuacaaacugcuugguuaa

SEQ ID NO: 2632 - RNA, 19 nt, Artificial Sequence
  Synthetic
caguggaaaucaugaccua

SEQ ID NO: 2633 - RNA, 19 nt, Artificial Sequence
  Synthetic
guacagagcaauguggaua

SEQ ID NO: 2634 - RNA, 19 nt, Artificial Sequence
  Synthetic
guagaggguuucuugauua

SEQ ID NO: 2635 - RNA, 19 nt, Artificial Sequence
  Synthetic
cagaaagaccugcugaauu

SEQ ID NO: 2636 - RNA, 19 nt, Artificial Sequence
  Synthetic
cgguauugccugcacauua

SEQ ID NO: 2637 - RNA, 19 nt, Artificial Sequence
  Synthetic
gcucaaggcagaauauauu

SEQ ID NO: 2638 - RNA, 19 nt, Artificial Sequence
  Synthetic
uuuacaaacugcuugguua

SEQ ID NO: 2639 - RNA, 19 nt, Artificial Sequence
  Synthetic
agaaaugauugccaaguuu

SEQ ID NO: 2640 - RNA, 19 nt, Artificial Sequence
  Synthetic
caucucaaccaguggaaau

SEQ ID NO: 2641 - RNA, 19 nt, Artificial Sequence
  Synthetic
ccaagaagaaguagugagu

SEQ ID NO: 2642 - RNA, 19 nt, Artificial Sequence
  Synthetic
aauucaaagagcugggcaa

SEQ ID NO: 2643 - RNA, 19 nt, Artificial Sequence
  Synthetic
aggcaaagaaguauggguu

SEQ ID NO: 2644 - RNA, 19 nt, Artificial Sequence
  Synthetic
gaaagaagauacaguuacu

SEQ ID NO: 2645 - RNA, 19 nt, Artificial Sequence
  Synthetic
gguuggagguggagaacuc

SEQ ID NO: 2646 - RNA, 19 nt, Artificial Sequence
  Synthetic
uugaugugguacagagcaa

SEQ ID NO: 2647 - RNA, 19 nt, Artificial Sequence
  Synthetic
ccaauucguuucuggauuu

SEQ ID NO: 2648 - RNA, 19 nt, Artificial Sequence
  Synthetic
gcagaauauauuugcccua

SEQ ID NO: 2649 - RNA, 19 nt, Artificial Sequence
  Synthetic
gcaauagacuggauggaaa

SEQ ID NO: 2650 - RNA, 19 nt, Artificial Sequence
  Synthetic
ggaugaagcuggaggcaga

SEQ ID NO: 2651 - RNA, 19 nt, Artificial Sequence
  Synthetic
gagaaaggagggaagauaa

SEQ ID NO: 2652 - RNA, 19 nt, Artificial Sequence
  Synthetic
acaaagaacccgaaagaca

SEQ ID NO: 2653 - RNA, 19 nt, Artificial Sequence
  Synthetic
ggagaaaggagggaagaua

SEQ ID NO: 2654 - RNA, 19 nt, Artificial Sequence
  Synthetic
aaucaagccuggagauauu

SEQ ID NO: 2655 - RNA, 19 nt, Artificial Sequence
  Synthetic
ggaagaaagcccuaaguga

SEQ ID NO: 2656 - RNA, 19 nt, Artificial Sequence
  Synthetic
cuacaaagaacccgaaaga

SEQ ID NO: 2657 - RNA, 19 nt, Artificial Sequence
  Synthetic
caaagaacccgaaagacaa

SEQ ID NO: 2658 - RNA, 19 nt, Artificial Sequence
  Synthetic
ggacagucauugcguaaaa

SEQ ID NO: 2659 - RNA, 19 nt, Artificial Sequence
  Synthetic
agaaaggagggaagauaau

SEQ ID NO: 2660 - RNA, 19 nt, Artificial Sequence
  Synthetic
ggucagauguggagaaagg

SEQ ID NO: 2661 - RNA, 19 nt, Artificial Sequence
  Synthetic
ggagauauuaaaagaggaa

SEQ ID NO: 2662 - RNA, 19 nt, Artificial Sequence
  Synthetic
ccaaucaagccuggagaua

SEQ ID NO: 2663 - RNA, 19 nt, Artificial Sequence
  Synthetic
cgacagaaggugaagccga

SEQ ID NO: 2664 - RNA, 19 nt, Artificial Sequence
  Synthetic
gccaucaacuauaaugaaa

SEQ ID NO: 2665 - RNA, 19 nt, Artificial Sequence
  Synthetic
uguucaaacugaccaauaa

SEQ ID NO: 2666 - RNA, 19 nt, Artificial Sequence
  Synthetic
aaagacaaguccagcauga

SEQ ID NO: 2667 - RNA, 19 nt, Artificial Sequence
  Synthetic
aaaggagggaagauaauua

SEQ ID NO: 2668 - RNA, 19 nt, Artificial Sequence
  Synthetic
ccaaagccguauuagaaaa

SEQ ID NO: 2669 - RNA, 19 nt, Artificial Sequence
  Synthetic
aaggacagucauugcguaa

SEQ ID NO: 2670 - RNA, 19 nt, Artificial Sequence
  Synthetic
caaacugaccaauaagaau

SEQ ID NO: 2671 - RNA, 19 nt, Artificial Sequence
  Synthetic
acuguuggcugauuggaaa

SEQ ID NO: 2672 - RNA, 19 nt, Artificial Sequence
  Synthetic
caggucagauguggagaaa

SEQ ID NO: 2673 - RNA, 19 nt, Artificial Sequence
  Synthetic
gguaagauaacuuucauca

SEQ ID NO: 2674 - RNA, 19 nt, Artificial Sequence
  Synthetic
cccaaagccguauuagaaa

SEQ ID NO: 2675 - RNA, 19 nt, Artificial Sequence
  Synthetic
cgaaagacaaguccagcau

SEQ ID NO: 2676 - RNA, 19 nt, Artificial Sequence
  Synthetic
gugacaugaacguggacuu

SEQ ID NO: 2677 - RNA, 19 nt, Artificial Sequence
  Synthetic
uggaaagaagaaaggggua

SEQ ID NO: 2678 - RNA, 19 nt, Artificial Sequence
  Synthetic
caugaggagucgacagaag

SEQ ID NO: 2679 - RNA, 19 nt, Artificial Sequence
  Synthetic
aaacaaaggugaagaacaa

SEQ ID NO: 2680 - RNA, 19 nt, Artificial Sequence
  Synthetic
gaagagaaccagagacaaa

SEQ ID NO: 2681 - RNA, 19 nt, Artificial Sequence
  Synthetic
gcauagagauggacaguau

SEQ ID NO: 2682 - RNA, 19 nt, Artificial Sequence
  Synthetic
agaaaggauuguaggagaa

SEQ ID NO: 2683 - RNA, 19 nt, Artificial Sequence
  Synthetic
aauuagaguugguggaaau

SEQ ID NO: 2684 - RNA, 19 nt, Artificial Sequence
  Synthetic
agaaauaccucauccgaaa

SEQ ID NO: 2685 - RNA, 19 nt, Artificial Sequence
  Synthetic
gaaagaagcucuaaaggau

SEQ ID NO: 2686 - RNA, 19 nt, Artificial Sequence
  Synthetic
gauuguaggagaagauaaa

SEQ ID NO: 2687 - RNA, 19 nt, Artificial Sequence
  Synthetic
gggaaacauucaagaaaca

SEQ ID NO: 2688 - RNA, 19 nt, Artificial Sequence
  Synthetic
guuuugagcuaguggagaa

SEQ ID NO: 2689 - RNA, 19 nt, Artificial Sequence
  Synthetic
ugaccaaaugugugaaaua

SEQ ID NO: 2690 - RNA, 19 nt, Artificial Sequence
  Synthetic
gguuaaagucugcaacuaa

SEQ ID NO: 2691 - RNA, 19 nt, Artificial Sequence
  Synthetic
ccaaggagucaaaggacaa

SEQ ID NO: 2692 - RNA, 19 nt, Artificial Sequence
  Synthetic
gggaagugugaaagugaua

SEQ ID NO: 2693 - RNA, 19 nt, Artificial Sequence
  Synthetic
gguuuuaaaucuggaguaa

SEQ ID NO: 2694 - RNA, 19 nt, Artificial Sequence
  Synthetic
gugcaaagcuuaaaggagu

SEQ ID NO: 2695 - RNA, 19 nt, Artificial Sequence
  Synthetic
cuagaagaauggagcacaa

SEQ ID NO: 2696 - RNA, 19 nt, Artificial Sequence
  Synthetic
gagacaaacuagaucaaaa

SEQ ID NO: 2697 - RNA, 19 nt, Artificial Sequence
  Synthetic
gaauauagagcaucugaaa

SEQ ID NO: 2698 - RNA, 19 nt, Artificial Sequence
  Synthetic
uggaagagaaccagagaca

SEQ ID NO: 2699 - RNA, 19 nt, Artificial Sequence
  Synthetic
uguagaagcuauuggacuu

SEQ ID NO: 2700 - RNA, 19 nt, Artificial Sequence
  Synthetic
caaagcagauuaugagcua

SEQ ID NO: 2701 - RNA, 19 nt, Artificial Sequence
  Synthetic
cugaagacuuuaaagagaa

SEQ ID NO: 2702 - RNA, 19 nt, Artificial Sequence
  Synthetic
gggaaauugcaaagaagau

SEQ ID NO: 2703 - RNA, 19 nt, Artificial Sequence
  Synthetic
agucaaaggacaaucuaaa

SEQ ID NO: 2704 - RNA, 19 nt, Artificial Sequence
  Synthetic
ggaaauacacagccaagua

SEQ ID NO: 2705 - RNA, 19 nt, Artificial Sequence
  Synthetic
ugucauaccuagugaaagu

SEQ ID NO: 2706 - RNA, 19 nt, Artificial Sequence
  Synthetic
uagaaaggauuguaggaga

SEQ ID NO: 2707 - RNA, 19 nt, Artificial Sequence
  Synthetic
ggaagaaagaagcucuaaa

SEQ ID NO: 2708 - RNA, 19 nt, Artificial Sequence
  Synthetic
ggggugugguugagaauua

SEQ ID NO: 2709 - RNA, 19 nt, Artificial Sequence
  Synthetic
aagaagaugcugaggaaua

SEQ ID NO: 2710 - RNA, 19 nt, Artificial Sequence
  Synthetic
caaacaagagguugagaua

SEQ ID NO: 2711 - RNA, 19 nt, Artificial Sequence
  Synthetic
gauaaaaucgugagggaua

SEQ ID NO: 2712 - RNA, 19 nt, Artificial Sequence
  Synthetic
acaagaagaugcugaggaa

SEQ ID NO: 2713 - RNA, 19 nt, Artificial Sequence
  Synthetic
gagauaagaaaguggauuu

SEQ ID NO: 2714 - RNA, 19 nt, Artificial Sequence
  Synthetic
ccacagaagcccuggucaa

SEQ ID NO: 2715 - RNA, 19 nt, Artificial Sequence
  Synthetic
gaggaaauguugaaccuaa

SEQ ID NO: 2716 - RNA, 19 nt, Artificial Sequence
  Synthetic
gagauaagucgaagaguga

SEQ ID NO: 2717 - RNA, 19 nt, Artificial Sequence
  Synthetic
ggacaaagggagcguaaaa

SEQ ID NO: 2718 - RNA, 19 nt, Artificial Sequence
  Synthetic
ggacaagaauaucagagaa

SEQ ID NO: 2719 - RNA, 19 nt, Artificial Sequence
  Synthetic
gacaagaauaucagagaau

SEQ ID NO: 2720 - RNA, 19 nt, Artificial Sequence
  Synthetic
aagaagagcaggaagaaca

SEQ ID NO: 2721 - RNA, 19 nt, Artificial Sequence
  Synthetic
aggaaauguugaaccuaaa

SEQ ID NO: 2722 - RNA, 19 nt, Artificial Sequence
  Synthetic
ccauaaagauugcagaguu

SEQ ID NO: 2723 - RNA, 19 nt, Artificial Sequence
  Synthetic
gagaaucuguccaagguua

SEQ ID NO: 2724 - RNA, 19 nt, Artificial Sequence
  Synthetic
augcagaauuuauggguga

SEQ ID NO: 2725 - RNA, 19 nt, Artificial Sequence
  Synthetic
cagccuaccuccuguauua

SEQ ID NO: 2726 - RNA, 19 nt, Artificial Sequence
  Synthetic
uugcagaguugcuggagaa

SEQ ID NO: 2727 - RNA, 19 nt, Artificial Sequence
  Synthetic
uaaacuaccugauggacaa

SEQ ID NO: 2728 - RNA, 19 nt, Artificial Sequence
  Synthetic
augaagaagagcaggaaga

SEQ ID NO: 2729 - RNA, 19 nt, Artificial Sequence
  Synthetic
gcaggaagaacaaggugaa

SEQ ID NO: 2730 - RNA, 19 nt, Artificial Sequence
  Synthetic
ggaagaacaaggugaagga

SEQ ID NO: 2731 - RNA, 19 nt, Artificial Sequence
  Synthetic
gggaacuggugcuacauua

SEQ ID NO: 2732 - RNA, 19 nt, Artificial Sequence
  Synthetic
uggaguugcuaauggacaa

SEQ ID NO: 2733 - RNA, 19 nt, Artificial Sequence
  Synthetic
cagcagaguucaaaagaau

SEQ ID NO: 2734 - RNA, 19 nt, Artificial Sequence
  Synthetic
ggaaauuaguaaagaacug

SEQ ID NO: 2735 - RNA, 19 nt, Artificial Sequence
  Synthetic
ugaaaagggucgacaagaa

SEQ ID NO: 2736 - RNA, 19 nt, Artificial Sequence
  Synthetic
ccacauauauuuacagacu

SEQ ID NO: 2737 - RNA, 19 nt, Artificial Sequence
  Synthetic
ggacuuggaaauuaguaaa

SEQ ID NO: 2738 - RNA, 19 nt, Artificial Sequence
  Synthetic
gugaaggaagcgaggauga

SEQ ID NO: 2739 - RNA, 19 nt, Artificial Sequence
  Synthetic
agguagaggcugagggcua

SEQ ID NO: 2740 - RNA, 19 nt, Artificial Sequence
  Synthetic
cggaagaggaugaggacuu

SEQ ID NO: 2741 - RNA, 19 nt, Artificial Sequence
  Synthetic
gggugaagaagaaggagua

SEQ ID NO: 2742 - RNA, 19 nt, Artificial Sequence
  Synthetic
aagaugacgaggaggauaa

SEQ ID NO: 2743 - RNA, 19 nt, Artificial Sequence
  Synthetic
guggagaagcacugguaua

SEQ ID NO: 2744 - RNA, 19 nt, Artificial Sequence
  Synthetic
ucagaaggcucuuuggaua

SEQ ID NO: 2745 - RNA, 19 nt, Artificial Sequence
  Synthetic
gcacaggaggcauggcaaa

SEQ ID NO: 2746 - RNA, 19 nt, Artificial Sequence
  Synthetic
ugguggaaggcgaggauua

SEQ ID NO: 2747 - RNA, 19 nt, Artificial Sequence
  Synthetic
cagagaugaagaagcguua

SEQ ID NO: 2748 - RNA, 19 nt, Artificial Sequence
  Synthetic
gggaugagaaagaagauga

SEQ ID NO: 2749 - RNA, 19 nt, Artificial Sequence
  Synthetic
gaacaagguuggccauuuu

SEQ ID NO: 2750 - RNA, 19 nt, Artificial Sequence
  Synthetic
ggacgauggggaugagaaa

SEQ ID NO: 2751 - RNA, 19 nt, Artificial Sequence
  Synthetic
gagauaaacuggcgccuca

SEQ ID NO: 2752 - RNA, 19 nt, Artificial Sequence
  Synthetic
uguauaacguccugaugua

SEQ ID NO: 2753 - RNA, 19 nt, Artificial Sequence
  Synthetic
agaaagaagaugacgagga

SEQ ID NO: 2754 - RNA, 19 nt, Artificial Sequence
  Synthetic
acaacaacaugucggaaga

SEQ ID NO: 2755 - RNA, 19 nt, Artificial Sequence
  Synthetic
agaaucagaucgaguccaa

SEQ ID NO: 2756 - RNA, 19 nt, Artificial Sequence
  Synthetic
gcugguuccuuguggagaa

SEQ ID NO: 2757 - RNA, 19 nt, Artificial Sequence
  Synthetic
ggcacaaugauuugggcaa

SEQ ID NO: 2758 - RNA, 19 nt, Artificial Sequence
  Synthetic
augacgagguagaggcuga

SEQ ID NO: 2759 - RNA, 19 nt, Artificial Sequence
  Synthetic
ccgaguacuuccucaacaa

SEQ ID NO: 2760 - RNA, 19 nt, Artificial Sequence
  Synthetic
gcucugaguucauggaugu

SEQ ID NO: 2761 - RNA, 19 nt, Artificial Sequence
  Synthetic
augcagaccuggugaagca

SEQ ID NO: 2762 - RNA, 19 nt, Artificial Sequence
  Synthetic
ggcacuacuuugaugacaa

SEQ ID NO: 2763 - RNA, 19 nt, Artificial Sequence
  Synthetic
cugguauggucuagagcau

SEQ ID NO: 2764 - RNA, 19 nt, Artificial Sequence
  Synthetic
aagaagaugacgaggagga

SEQ ID NO: 2765 - RNA, 19 nt, Artificial Sequence
  Synthetic
gggcaugaagggugagauc

SEQ ID NO: 2766 - RNA, 19 nt, Artificial Sequence
  Synthetic
guuacuaugacgagguaga

SEQ ID NO: 2767 - RNA, 19 nt, Artificial Sequence
  Synthetic
guucauggauguuaauuga

SEQ ID NO: 2768 - RNA, 19 nt, Artificial Sequence
  Synthetic
gugagaucgcagaggccua

SEQ ID NO: 2769 - RNA, 19 nt, Artificial Sequence
  Synthetic
cagcaaagaugaagauuuu

SEQ ID NO: 2770 - RNA, 19 nt, Artificial Sequence
  Synthetic
ccuaagaaguucaucacaa

SEQ ID NO: 2771 - RNA, 19 nt, Artificial Sequence
  Synthetic
gaagagagaaagcaggaaa

SEQ ID NO: 2772 - RNA, 19 nt, Artificial Sequence
  Synthetic
caucacaagauuacggaaa

SEQ ID NO: 2773 - RNA, 19 nt, Artificial Sequence
  Synthetic
uugcaauaguuaagaguca

SEQ ID NO: 2774 - RNA, 19 nt, Artificial Sequence
  Synthetic
ccaccaauccagacagaau

SEQ ID NO: 2775 - RNA, 19 nt, Artificial Sequence
  Synthetic
gcagcaaagaugaagauuu

SEQ ID NO: 2776 - RNA, 19 nt, Artificial Sequence
  Synthetic
acaagauuacggaaagaaa

SEQ ID NO: 2777 - RNA, 19 nt, Artificial Sequence
  Synthetic
ugcacaagcuauugaagaa

SEQ ID NO: 2778 - RNA, 19 nt, Artificial Sequence
  Synthetic
ggaucaacuucaucgauau

SEQ ID NO: 2779 - RNA, 19 nt, Artificial Sequence
  Synthetic
cacaaacggaugaaaguua

SEQ ID NO: 2780 - RNA, 19 nt, Artificial Sequence
  Synthetic
gaaagagauugguccagaa

SEQ ID NO: 2781 - RNA, 19 nt, Artificial Sequence
  Synthetic
acaaacggaugaaaguuaa

SEQ ID NO: 2782 - RNA, 19 nt, Artificial Sequence
  Synthetic
gcguauaagagucaaccua

SEQ ID NO: 2783 - RNA, 19 nt, Artificial Sequence
  Synthetic
cagaacaguuuccggucaa

SEQ ID NO: 2784 - RNA, 19 nt, Artificial Sequence
  Synthetic
caucagauaucucaaagaa

SEQ ID NO: 2785 - RNA, 19 nt, Artificial Sequence
  Synthetic
ggcauuagagaaagagauu

SEQ ID NO: 2786 - RNA, 19 nt, Artificial Sequence
  Synthetic
gcccaugauucuagcucua

SEQ ID NO: 2787 - RNA, 19 nt, Artificial Sequence
  Synthetic
gcaaacaggaagcacacaa

SEQ ID NO: 2788 - RNA, 19 nt, Artificial Sequence
  Synthetic
gcaacaagaugcccaugaa

SEQ ID NO: 2789 - RNA, 19 nt, Artificial Sequence
  Synthetic
uggaucaacuucaucgaua

SEQ ID NO: 2790 - RNA, 19 nt, Artificial Sequence
  Synthetic
gcauagccacucagaagaa

SEQ ID NO: 2791 - RNA, 19 nt, Artificial Sequence
  Synthetic
guuuaacacuucaggugau

SEQ ID NO: 2792 - RNA, 19 nt, Artificial Sequence
  Synthetic
caaacaggaagcacacaaa

SEQ ID NO: 2793 - RNA, 19 nt, Artificial Sequence
  Synthetic
gaucaacuucaucgauaua

SEQ ID NO: 2794 - RNA, 19 nt, Artificial Sequence
  Synthetic
gcagcaaacaggaagcaca

SEQ ID NO: 2795 - RNA, 19 nt, Artificial Sequence
  Synthetic
ugaagagugucgcagcaaa

SEQ ID NO: 2796 - RNA, 19 nt, Artificial Sequence
  Synthetic
uugaagaauucuacggguu

SEQ ID NO: 2797 - RNA, 19 nt, Artificial Sequence
  Synthetic
cggcauuagagaaagagau

SEQ ID NO: 2798 - RNA, 19 nt, Artificial Sequence
  Synthetic
ucaauuacucacugcuuaa

SEQ ID NO: 2799 - RNA, 19 nt, Artificial Sequence
  Synthetic
ugauugagauggagaauaa

SEQ ID NO: 2800 - RNA, 19 nt, Artificial Sequence
  Synthetic
gcacgaaacugaagccaau

SEQ ID NO: 2801 - RNA, 19 nt, Artificial Sequence
  Synthetic
gggaacauguugaaagaca

SEQ ID NO: 2802 - RNA, 19 nt, Artificial Sequence
  Synthetic
ggucauuacauuugccaua

SEQ ID NO: 2803 - RNA, 19 nt, Artificial Sequence
  Synthetic
agaaugggcuccaggacaa

SEQ ID NO: 2804 - RNA, 19 nt, Artificial Sequence
  Synthetic
agacagugauuuugugauu

SEQ ID NO: 2805 - RNA, 19 nt, Artificial Sequence
  Synthetic
ugaugaaggaggagcacaa

SEQ ID NO: 2806 - RNA, 19 nt, Artificial Sequence
  Synthetic
auaugaagaugaagccaaa

SEQ ID NO: 2807 - RNA, 19 nt, Artificial Sequence
  Synthetic
gaagggaagcagaagcaaa

SEQ ID NO: 2808 - RNA, 19 nt, Artificial Sequence
  Synthetic
gcgacagggucuacaagaa

SEQ ID NO: 2809 - RNA, 19 nt, Artificial Sequence
  Synthetic
ugaaauagcacuaccaaau

SEQ ID NO: 2810 - RNA, 19 nt, Artificial Sequence
  Synthetic
ggacaauggagucaggauu

SEQ ID NO: 2811 - RNA, 19 nt, Artificial Sequence
  Synthetic
acacggagaggguggauua

SEQ ID NO: 2812 - RNA, 19 nt, Artificial Sequence
  Synthetic
ugaagaagacagugauuuu

SEQ ID NO: 2813 - RNA, 19 nt, Artificial Sequence
  Synthetic
gagaauaaugccaaugcaa

SEQ ID NO: 2814 - RNA, 19 nt, Artificial Sequence
  Synthetic
ggauggaucuggaacauau

SEQ ID NO: 2815 - RNA, 19 nt, Artificial Sequence
  Synthetic
acgaauaauaaccuggaaa

SEQ ID NO: 2816 - RNA, 19 nt, Artificial Sequence
  Synthetic
agaauaaugccaaugcaaa

SEQ ID NO: 2817 - RNA, 19 nt, Artificial Sequence
  Synthetic
acuugguagugcagauaaa

SEQ ID NO: 2818 - RNA, 19 nt, Artificial Sequence
  Synthetic
aggaugaacugaucgcuua

SEQ ID NO: 2819 - RNA, 19 nt, Artificial Sequence
  Synthetic
gggcagauguuuauucuuu

SEQ ID NO: 2820 - RNA, 19 nt, Artificial Sequence
  Synthetic
guuacagccaggagaggaa

SEQ ID NO: 2821 - RNA, 19 nt, Artificial Sequence
  Synthetic
gcacuggauuggaucuuua

SEQ ID NO: 2822 - RNA, 19 nt, Artificial Sequence
  Synthetic
ggaagauggcugcaggaga

SEQ ID NO: 2823 - RNA, 19 nt, Artificial Sequence
  Synthetic
ugaacuaacgagaagggaa

SEQ ID NO: 2824 - RNA, 19 nt, Artificial Sequence
  Synthetic
gaagaugggugauuuacaa

SEQ ID NO: 2825 - RNA, 19 nt, Artificial Sequence
  Synthetic
aggaggaauuccaagauuu

SEQ ID NO: 2826 - RNA, 19 nt, Artificial Sequence
  Synthetic
cagaggaaaucguagcuau

SEQ ID NO: 2827 - RNA, 19 nt, Artificial Sequence
  Synthetic
gcuuaugaacuaacgagaa

SEQ ID NO: 2828 - RNA, 19 nt, Artificial Sequence
  Synthetic
ggaaggaagaugggugauu

SEQ ID NO: 2829 - RNA, 19 nt, Artificial Sequence
  Synthetic
ggagaaauuugaaggugua

SEQ ID NO: 2830 - RNA, 19 nt, Artificial Sequence
  Synthetic
ggauuaaguuugaugauga

SEQ ID NO: 2831 - RNA, 19 nt, Artificial Sequence
  Synthetic
ugaaauaauggaagaggaa

SEQ ID NO: 2832 - RNA, 19 nt, Artificial Sequence
  Synthetic
gaaacaagaugaauggauu

SEQ ID NO: 2833 - RNA, 19 nt, Artificial Sequence
  Synthetic
agaggaaagugaacaguaa

SEQ ID NO: 2834 - RNA, 19 nt, Artificial Sequence
  Synthetic
ggugaaaggaggaacgcua

SEQ ID NO: 2835 - RNA, 19 nt, Artificial Sequence
  Synthetic
gccaaauacaagugacaaa

SEQ ID NO: 2836 - RNA, 19 nt, Artificial Sequence
  Synthetic
gaguauugcaacagaaauu

SEQ ID NO: 2837 - RNA, 19 nt, Artificial Sequence
  Synthetic
accagaacuucaagagaaa

SEQ ID NO: 2838 - RNA, 19 nt, Artificial Sequence
  Synthetic
ccagaaagaaguuaaguau

SEQ ID NO: 2839 - RNA, 19 nt, Artificial Sequence
  Synthetic
gaguugaaauaauggaaga

SEQ ID NO: 2840 - RNA, 19 nt, Artificial Sequence
  Synthetic
acagaaaguuauggugaaa

SEQ ID NO: 2841 - RNA, 19 nt, Artificial Sequence
  Synthetic
caacagaaauuggaagcaa

SEQ ID NO: 2842 - RNA, 19 nt, Artificial Sequence
  Synthetic
cgagaaaggugaacaagga

SEQ ID NO: 2843 - RNA, 19 nt, Artificial Sequence
  Synthetic
auccagagcuuuagaggaa

SEQ ID NO: 2844 - RNA, 19 nt, Artificial Sequence
  Synthetic
agaagaacccucagccaaa

SEQ ID NO: 2845 - RNA, 19 nt, Artificial Sequence
  Synthetic
gaggaacgcuaaaggauga

SEQ ID NO: 2846 - RNA, 19 nt, Artificial Sequence
  Synthetic
caccagaacuucaagagaa

SEQ ID NO: 2847 - RNA, 19 nt, Artificial Sequence
  Synthetic
gacagaaaguuauggugaa

SEQ ID NO: 2848 - RNA, 19 nt, Artificial Sequence
  Synthetic
gcugaagacauguuuaaua

SEQ ID NO: 2849 - RNA, 19 nt, Artificial Sequence
  Synthetic
gcuaaugaauguuggauac

SEQ ID NO: 2850 - RNA, 19 nt, Artificial Sequence
  Synthetic
gcaaagaaaugccuuguau

SEQ ID NO: 2851 - RNA, 19 nt, Artificial Sequence
  Synthetic
caugaaauguacagaaucu

SEQ ID NO: 2852 - RNA, 19 nt, Artificial Sequence
  Synthetic
gaaauuugaagguguagaa

SEQ ID NO: 2853 - RNA, 19 nt, Artificial Sequence
  Synthetic
gcaggugccuugagagcuu

SEQ ID NO: 2854 - RNA, 19 nt, Artificial Sequence
  Synthetic
ccaaaguucuuaaggaugu

SEQ ID NO: 2855 - RNA, 19 nt, Artificial Sequence
  Synthetic
ucuauaauccagagcuuua

SEQ ID NO: 2856 - RNA, 19 nt, Artificial Sequence
  Synthetic
gcgaguauugcaacagaaa

SEQ ID NO: 2857 - RNA, 19 nt, Artificial Sequence
  Synthetic
cuugagagcuucaggggaa

SEQ ID NO: 2858 - RNA, 19 nt, Artificial Sequence
  Synthetic
ggauacaaaugaugcgagu

SEQ ID NO: 2859 - RNA, 19 nt, Artificial Sequence
  Synthetic
ggaacaaauacaugaguaa

SEQ ID NO: 2860 - RNA, 19 nt, Artificial Sequence
  Synthetic
gcagauaagaugauaguua

SEQ ID NO: 2861 - RNA, 19 nt, Artificial Sequence
  Synthetic
aggaaugagaggugaaaua

SEQ ID NO: 2862 - RNA, 19 nt, Artificial Sequence
  Synthetic
gcauaaacaccuugaauuu

SEQ ID NO: 2863 - RNA, 19 nt, Artificial Sequence
  Synthetic
gaauugaagcuaugugaaa

SEQ ID NO: 2864 - RNA, 19 nt, Artificial Sequence
  Synthetic
augaaaguguggaguauaa

SEQ ID NO: 2865 - RNA, 19 nt, Artificial Sequence
  Synthetic
gauuuuaacuugugcagua

SEQ ID NO: 2866 - RNA, 19 nt, Artificial Sequence
  Synthetic
ggaaacagguucuagauuu

SEQ ID NO: 2867 - RNA, 19 nt, Artificial Sequence
  Synthetic
acaaauaccagaugggaga

SEQ ID NO: 2868 - RNA, 19 nt, Artificial Sequence
  Synthetic
cauuugaaccacugaauaa

SEQ ID NO: 2869 - RNA, 19 nt, Artificial Sequence
  Synthetic
gaaacaauacugaagacaa

SEQ ID NO: 2870 - RNA, 19 nt, Artificial Sequence
  Synthetic
uagcaaagcugacacaaua

SEQ ID NO: 2871 - RNA, 19 nt, Artificial Sequence
  Synthetic
gaugugaguugaugacaaa

SEQ ID NO: 2872 - RNA, 19 nt, Artificial Sequence
  Synthetic
cugcaaaguagaaguauau

SEQ ID NO: 2873 - RNA, 19 nt, Artificial Sequence
  Synthetic
ggagauaaugauucugaaa

SEQ ID NO: 2874 - RNA, 19 nt, Artificial Sequence
  Synthetic
auacagagcacgugauuau

SEQ ID NO: 2875 - RNA, 19 nt, Artificial Sequence
  Synthetic
acacauugauggaagguca

SEQ ID NO: 2876 - RNA, 19 nt, Artificial Sequence
  Synthetic
acugcaaaguagaaguaua

SEQ ID NO: 2877 - RNA, 19 nt, Artificial Sequence
  Synthetic
ccuguuugccuaagagaaa

SEQ ID NO: 2878 - RNA, 19 nt, Artificial Sequence
  Synthetic
gauggaaggucaagagcca

SEQ ID NO: 2879 - RNA, 19 nt, Artificial Sequence
  Synthetic
gagaccagauuguggaaca

SEQ ID NO: 2880 - RNA, 19 nt, Artificial Sequence
  Synthetic
uguuguaacucgaagauuu

SEQ ID NO: 2881 - RNA, 19 nt, Artificial Sequence
  Synthetic
aagcaaauguggucuggaa

SEQ ID NO: 2882 - RNA, 19 nt, Artificial Sequence
  Synthetic
acaauuggcuauaaaggua

SEQ ID NO: 2883 - RNA, 19 nt, Artificial Sequence
  Synthetic
ucagauaaccgaauguaaa

SEQ ID NO: 2884 - RNA, 19 nt, Artificial Sequence
  Synthetic
gaauauucgcuauggauga

SEQ ID NO: 2885 - RNA, 19 nt, Artificial Sequence
  Synthetic
gcagauggaaggccagaua

SEQ ID NO: 2886 - RNA, 19 nt, Artificial Sequence
  Synthetic
aggacagguauuagugaua

SEQ ID NO: 2887 - RNA, 19 nt, Artificial Sequence
  Synthetic
ucagcaagccacaaagaaa

SEQ ID NO: 2888 - RNA, 19 nt, Artificial Sequence
  Synthetic
ccgaacugaucaagcaaau

SEQ ID NO: 2889 - RNA, 19 nt, Artificial Sequence
  Synthetic
agauaaagcugaagaagaa

SEQ ID NO: 2890 - RNA, 19 nt, Artificial Sequence
  Synthetic
ggaacaagguaauuugaaa

SEQ ID NO: 2891 - RNA, 19 nt, Artificial Sequence
  Synthetic
aaacauggcuaaagagaau

SEQ ID NO: 2892 - RNA, 19 nt, Artificial Sequence
  Synthetic
agaucaagauagugaggaa

SEQ ID NO: 2893 - RNA, 19 nt, Artificial Sequence
  Synthetic
cagagaaagauaauggaaa

SEQ ID NO: 2894 - RNA, 19 nt, Artificial Sequence
  Synthetic
aagagugaguaaaggaaua

SEQ ID NO: 2895 - RNA, 19 nt, Artificial Sequence
  Synthetic
ccacagaggaaguagauau

SEQ ID NO: 2896 - RNA, 19 nt, Artificial Sequence
  Synthetic
agaaugaacaagagagaga

SEQ ID NO: 2897 - RNA, 19 nt, Artificial Sequence
  Synthetic
ugaucagagugguaagaaa

SEQ ID NO: 2898 - RNA, 19 nt, Artificial Sequence
  Synthetic
caucuuugguggugaacua

SEQ ID NO: 2899 - RNA, 19 nt, Artificial Sequence
  Synthetic
agaaacggacaaagggaaa

SEQ ID NO: 2900 - RNA, 19 nt, Artificial Sequence
  Synthetic
guucaaaccaguuggguca

SEQ ID NO: 2901 - RNA, 19 nt, Artificial Sequence
  Synthetic
gaccaaaggcaaauauaaa

SEQ ID NO: 2902 - RNA, 19 nt, Artificial Sequence
  Synthetic
ggaccaaaggcaaauauaa

SEQ ID NO: 2903 - RNA, 19 nt, Artificial Sequence
  Synthetic
ggaugaagaucaagauagu

SEQ ID NO: 2904 - RNA, 19 nt, Artificial Sequence
  Synthetic
ugaagaagaaacagaagaa

SEQ ID NO: 2905 - RNA, 19 nt, Artificial Sequence
  Synthetic
guaauggaccaaaggcaaa

SEQ ID NO: 2906 - RNA, 19 nt, Artificial Sequence
  Synthetic
gugaauguggaauggaaua

SEQ ID NO: 2907 - RNA, 19 nt, Artificial Sequence
  Synthetic
uaagaauguugcagaagaa

SEQ ID NO: 2908 - RNA, 19 nt, Artificial Sequence
  Synthetic
agugaaagauaaagcugaa

SEQ ID NO: 2909 - RNA, 19 nt, Artificial Sequence
  Synthetic
gaacaaagguguaugaggu

SEQ ID NO: 2910 - RNA, 19 nt, Artificial Sequence
  Synthetic
gaaccaacgaagacaacaa

SEQ ID NO: 2911 - RNA, 19 nt, Artificial Sequence
  Synthetic
gugaaaggacucaguaauu

SEQ ID NO: 2912 - RNA, 19 nt, Artificial Sequence
  Synthetic
cagaggaaguagauaugaa

SEQ ID NO: 2913 - RNA, 19 nt, Artificial Sequence
  Synthetic
ggaagggagcaauggagaa

SEQ ID NO: 2914 - RNA, 19 nt, Artificial Sequence
  Synthetic
aagauaaagcugaagaaga

SEQ ID NO: 2915 - RNA, 19 nt, Artificial Sequence
  Synthetic
agagagaaaagaaggaaaa

SEQ ID NO: 2916 - RNA, 19 nt, Artificial Sequence
  Synthetic
gaaagauaaagcugaagaa

SEQ ID NO: 2917 - RNA, 19 nt, Artificial Sequence
  Synthetic
cgaauaaacugcuuuguga

SEQ ID NO: 2918 - RNA, 19 nt, Artificial Sequence
  Synthetic
cuguaagacugacaauaaa

SEQ ID NO: 2919 - RNA, 19 nt, Artificial Sequence
  Synthetic
gaagaagacccgugggaaa

SEQ ID NO: 2920 - RNA, 19 nt, Artificial Sequence
  Synthetic
ggacagaccugcugccuua

SEQ ID NO: 2921 - RNA, 19 nt, Artificial Sequence
  Synthetic
cugcauaucuucugguuua

SEQ ID NO: 2922 - RNA, 19 nt, Artificial Sequence
  Synthetic
acaugaagauggagugcua

SEQ ID NO: 2923 - RNA, 19 nt, Artificial Sequence
  Synthetic
ccauaugaaucaaguguuu

SEQ ID NO: 2924 - RNA, 19 nt, Artificial Sequence
  Synthetic
gcauggcgcuugagagauu

SEQ ID NO: 2925 - RNA, 19 nt, Artificial Sequence
  Synthetic
ggaaugcuguggauggaaa

SEQ ID NO: 2926 - RNA, 19 nt, Artificial Sequence
  Synthetic
uccauaagauagugugaua

SEQ ID NO: 2927 - RNA, 19 nt, Artificial Sequence
  Synthetic
agaaggaagaagacagcaa

SEQ ID NO: 2928 - RNA, 19 nt, Artificial Sequence
  Synthetic
ggaaacaggucuugaagcu

SEQ ID NO: 2929 - RNA, 19 nt, Artificial Sequence
  Synthetic
ggaauucacagacgagaaa

SEQ ID NO: 2930 - RNA, 19 nt, Artificial Sequence
  Synthetic
uaaacacggucaugaauaa

SEQ ID NO: 2931 - RNA, 19 nt, Artificial Sequence
  Synthetic
cccaaaaccuucagagauu

SEQ ID NO: 2932 - RNA, 19 nt, Artificial Sequence
  Synthetic
ggaaaauggucuugcuuca

SEQ ID NO: 2933 - RNA, 19 nt, Artificial Sequence
  Synthetic
acagcaacaugaagagaga

SEQ ID NO: 2934 - RNA, 19 nt, Artificial Sequence
  Synthetic
gggaagacauccaguguac

SEQ ID NO: 2935 - RNA, 19 nt, Artificial Sequence
  Synthetic
gacauuagcccuuuaguua

SEQ ID NO: 2936 - RNA, 19 nt, Artificial Sequence
  Synthetic
ggaaaaugguucugcuuca

SEQ ID NO: 2937 - RNA, 19 nt, Artificial Sequence
  Synthetic
gcugacgagcagaggagaa

SEQ ID NO: 2938 - RNA, 19 nt, Artificial Sequence
  Synthetic
aagaaaagaaggaagaaga

SEQ ID NO: 2939 - RNA, 19 nt, Artificial Sequence
  Synthetic
ccaggauauugaagaggau

SEQ ID NO: 2940 - RNA, 19 nt, Artificial Sequence
  Synthetic
ugauaaacacggucaugaa

SEQ ID NO: 2941 - RNA, 19 nt, Artificial Sequence
  Synthetic
ccaacaugaugcugcccaa

SEQ ID NO: 2942 - RNA, 19 nt, Artificial Sequence
  Synthetic
ggagaagcauuguuuucaa

SEQ ID NO: 2943 - RNA, 19 nt, Artificial Sequence
  Synthetic
ccagggaguuaucaagcaa

SEQ ID NO: 2944 - RNA, 19 nt, Artificial Sequence
  Synthetic
aggaauucacagacgagaa

SEQ ID NO: 2945 - RNA, 19 nt, Artificial Sequence
  Synthetic
gggaagaagacccguggga

SEQ ID NO: 2946 - RNA, 19 nt, Artificial Sequence
  Synthetic
gagaagcauuguuuucaaa

SEQ ID NO: 2947 - RNA, 19 nt, Artificial Sequence
  Synthetic
ucguaaugaauguggacuu

SEQ ID NO: 2948 - RNA, 19 nt, Artificial Sequence
  Synthetic
aggauauugaagaggauca

SEQ ID NO: 2949 - RNA, 19 nt, Artificial Sequence
  Synthetic
cgacagauguggagaaaau

SEQ ID NO: 2950 - RNA, 19 nt, Artificial Sequence
  Synthetic
cugaauaccuggucgacua

SEQ ID NO: 2951 - RNA, 19 nt, Artificial Sequence
  Synthetic
agacccagauccagagaua

SEQ ID NO: 2952 - RNA, 19 nt, Artificial Sequence
  Synthetic
ucgacuaccuggagaacua

SEQ ID NO: 2953 - RNA, 19 nt, Artificial Sequence
  Synthetic
ccaaagaggaugugcuuga

SEQ ID NO: 2954 - RNA, 19 nt, Artificial Sequence
  Synthetic
gaagggacaucuuuggaaa

SEQ ID NO: 2955 - RNA, 19 nt, Artificial Sequence
  Synthetic
gggaagagacggcaugaau

SEQ ID NO: 2956 - RNA, 19 nt, Artificial Sequence
  Synthetic
acacaaaccugacaagaga

SEQ ID NO: 2957 - RNA, 19 nt, Artificial Sequence
  Synthetic
cgagaaaggccgacagaug

SEQ ID NO: 2958 - RNA, 19 nt, Artificial Sequence
  Synthetic
cugcagugccugagcaaca

SEQ ID NO: 2959 - RNA, 19 nt, Artificial Sequence
  Synthetic
gcaugaggcucuucaccaa

SEQ ID NO: 2960 - RNA, 19 nt, Artificial Sequence
  Synthetic
acacagcccucguggaaga

SEQ ID NO: 2961 - RNA, 19 nt, Artificial Sequence
  Synthetic
gaccuggacuuaagagaau

SEQ ID NO: 2962 - RNA, 19 nt, Artificial Sequence
  Synthetic
ggaagagacggcaugaauu

SEQ ID NO: 2963 - RNA, 19 nt, Artificial Sequence
  Synthetic
aggaugugcuugauggaga

SEQ ID NO: 2964 - RNA, 19 nt, Artificial Sequence
  Synthetic
cggcaugaauucuaagagu

SEQ ID NO: 2965 - RNA, 19 nt, Artificial Sequence
  Synthetic
cugaagcgcuacacagaau

SEQ ID NO: 2966 - RNA, 19 nt, Artificial Sequence
  Synthetic
gaaaauaucuagaacggga

SEQ ID NO: 2967 - RNA, 19 nt, Artificial Sequence
  Synthetic
ucgcugacguguacagauu

SEQ ID NO: 2968 - RNA, 19 nt, Artificial Sequence
  Synthetic
ugacauuaauggacugcau

SEQ ID NO: 2969 - RNA, 19 nt, Artificial Sequence
  Synthetic
acaaaccugacaagagaaa

SEQ ID NO: 2970 - RNA, 19 nt, Artificial Sequence
  Synthetic
ggcagaaaacgguguauaa

SEQ ID NO: 2971 - RNA, 19 nt, Artificial Sequence
  Synthetic
uaacuaaaguguucagacu

SEQ ID NO: 2972 - RNA, 19 nt, Artificial Sequence
  Synthetic
caucugaguucaagaccca

SEQ ID NO: 2973 - RNA, 19 nt, Artificial Sequence
  Synthetic
gccgacagauguggagaaa

SEQ ID NO: 2974 - RNA, 19 nt, Artificial Sequence
  Synthetic
ggaugugcuugauggagau

SEQ ID NO: 2975 - RNA, 19 nt, Artificial Sequence
  Synthetic
acacacagcccucguggaa

SEQ ID NO: 2976 - RNA, 19 nt, Artificial Sequence
  Synthetic
agaaaacgguguauaaaga

SEQ ID NO: 2977 - RNA, 19 nt, Artificial Sequence
  Synthetic
cgaggugaaccgagugaca

SEQ ID NO: 2978 - RNA, 19 nt, Artificial Sequence
  Synthetic
ucaacaaagccaagaauuc

SEQ ID NO: 2979 - RNA, 19 nt, Artificial Sequence
  Synthetic
ggacaaugaugcucaccua

SEQ ID NO: 2980 - RNA, 19 nt, Artificial Sequence
  Synthetic
cugaugaguuaaaggguga

SEQ ID NO: 2981 - RNA, 19 nt, Artificial Sequence
  Synthetic
ggucaaaggaagcggccau

SEQ ID NO: 2982 - RNA, 19 nt, Artificial Sequence
  Synthetic
ccauaggagaggugaccaa

SEQ ID NO: 2983 - RNA, 19 nt, Artificial Sequence
  Synthetic
ucaagaaagcccagguauu

SEQ ID NO: 2984 - RNA, 19 nt, Artificial Sequence
  Synthetic
gggaguagcugcugcuuca

SEQ ID NO: 2985 - RNA, 19 nt, Artificial Sequence
  Synthetic
guacaaacucggagcaagu

SEQ ID NO: 2986 - RNA, 19 nt, Artificial Sequence
  Synthetic
gaaaggaggaccuggccaa

SEQ ID NO: 2987 - RNA, 19 nt, Artificial Sequence
  Synthetic
aguuaaagggugacaacau

SEQ ID NO: 2988 - RNA, 19 nt, Artificial Sequence
  Synthetic
augagaaacgggaggguga

SEQ ID NO: 2989 - RNA, 19 nt, Artificial Sequence
  Synthetic
gagugacacggaugagaaa

SEQ ID NO: 2990 - RNA, 19 nt, Artificial Sequence
  Synthetic
gcaugaagaaccucgggaa

SEQ ID NO: 2991 - RNA, 19 nt, Artificial Sequence
  Synthetic
cgccagagccggacaauga

SEQ ID NO: 2992 - RNA, 19 nt, Artificial Sequence
  Synthetic
cgucguacgugcucaagaa

SEQ ID NO: 2993 - RNA, 19 nt, Artificial Sequence
  Synthetic
gguguaagaagcugcggaa

SEQ ID NO: 2994 - RNA, 19 nt, Artificial Sequence
  Synthetic
gguacgaguuugaugacca

SEQ ID NO: 2995 - RNA, 19 nt, Artificial Sequence
  Synthetic
ugcagaacgccgagggcua

SEQ ID NO: 2996 - RNA, 19 nt, Artificial Sequence
  Synthetic
gggcagauuucggaggaga

SEQ ID NO: 2997 - RNA, 19 nt, Artificial Sequence
  Synthetic
guaaagaggcagaaaaguu

SEQ ID NO: 2998 - RNA, 19 nt, Artificial Sequence
  Synthetic
ccugugagaaggagguauu

SEQ ID NO: 2999 - RNA, 19 nt, Artificial Sequence
  Synthetic
ggaaccggaugaugaaaca

SEQ ID NO: 3000 - RNA, 19 nt, Artificial Sequence
  Synthetic
ggaccaaaccuaugggccu

SEQ ID NO: 3001 - RNA, 19 nt, Artificial Sequence
  Synthetic
ccauucaugcacaggcaaa

SEQ ID NO: 3002 - RNA, 19 nt, Artificial Sequence
  Synthetic
ucugaaagcuguuccuauu

SEQ ID NO: 3003 - RNA, 19 nt, Artificial Sequence
  Synthetic
aagcacaacuugaccguga

SEQ ID NO: 3004 - RNA, 19 nt, Artificial Sequence
  Synthetic
acgagacgguggugcagaa

SEQ ID NO: 3005 - RNA, 19 nt, Artificial Sequence
  Synthetic
cugcucaaaucuaagggaa

SEQ ID NO: 3006 - RNA, 19 nt, Artificial Sequence
  Synthetic
gagcugaugcuaaagaaga

SEQ ID NO: 3007 - RNA, 19 nt, Artificial Sequence
  Synthetic
cgagugacacggaugagaa

SEQ ID NO: 3008 - RNA, 19 nt, Artificial Sequence
  Synthetic
ucucugaggucuggcauaa

SEQ ID NO: 3009 - RNA, 19 nt, Artificial Sequence
  Synthetic
gcuagaagaaccugaguua

SEQ ID NO: 3010 - RNA, 19 nt, Artificial Sequence
  Synthetic
gagcugucuuccagaaaua

SEQ ID NO: 3011 - RNA, 19 nt, Artificial Sequence
  Synthetic
gagccaaccuaauguggaa

SEQ ID NO: 3012 - RNA, 19 nt, Artificial Sequence
  Synthetic
gugccaggccuguggguau

SEQ ID NO: 3013 - RNA, 19 nt, Artificial Sequence
  Synthetic
aagaagagcuagagucgga

SEQ ID NO: 3014 - RNA, 19 nt, Artificial Sequence
  Synthetic
guuucaaccuuuucacuaa

SEQ ID NO: 3015 - RNA, 19 nt, Artificial Sequence
  Synthetic
gguuguagcuccauuauuu

SEQ ID NO: 3016 - RNA, 19 nt, Artificial Sequence
  Synthetic
cacuaaggaagaagagcua

SEQ ID NO: 3017 - RNA, 19 nt, Artificial Sequence
  Synthetic
cuaaggaagaagagcuaga

SEQ ID NO: 3018 - RNA, 19 nt, Artificial Sequence
  Synthetic
cggcagaaaacucgaagua

SEQ ID NO: 3019 - RNA, 19 nt, Artificial Sequence
  Synthetic
guacaaagauucccucgaa

SEQ ID NO: 3020 - RNA, 19 nt, Artificial Sequence
  Synthetic
ugaugaacggcucaagaaa

SEQ ID NO: 3021 - RNA, 19 nt, Artificial Sequence
  Synthetic
ccacccacuuugagacgua

SEQ ID NO: 3022 - RNA, 19 nt, Artificial Sequence
  Synthetic
gcgagaggacagcaagauu

SEQ ID NO: 3023 - RNA, 19 nt, Artificial Sequence
  Synthetic
cugugaagcccuuuaaaca

SEQ ID NO: 3024 - RNA, 19 nt, Artificial Sequence
  Synthetic
guuaagugaugaugaccga

SEQ ID NO: 3025 - RNA, 19 nt, Artificial Sequence
  Synthetic
gagcgagaggacagcaaga

SEQ ID NO: 3026 - RNA, 19 nt, Artificial Sequence
  Synthetic
ccucagagacgucuauuuu

SEQ ID NO: 3027 - RNA, 19 nt, Artificial Sequence
  Synthetic
gcagcaaggagcgcagaaa

SEQ ID NO: 3028 - RNA, 19 nt, Artificial Sequence
  Synthetic
gcgcagaaacccagccucu

SEQ ID NO: 3029 - RNA, 19 nt, Artificial Sequence
  Synthetic
uagaagaaccugaguuaag

SEQ ID NO: 3030 - RNA, 19 nt, Artificial Sequence
  Synthetic
cuucgaaaccugggaaaca

SEQ ID NO: 3031 - RNA, 19 nt, Artificial Sequence
  Synthetic
gaaccugaguuaagugaug

SEQ ID NO: 3032 - RNA, 19 nt, Artificial Sequence
  Synthetic
uggcauccagcgagggcua

SEQ ID NO: 3033 - RNA, 19 nt, Artificial Sequence
  Synthetic
aguugacaguacaaagauu

SEQ ID NO: 3034 - RNA, 19 nt, Artificial Sequence
  Synthetic
uucaguagguguagacuuu

SEQ ID NO: 3035 - RNA, 19 nt, Artificial Sequence
  Synthetic
gcaggaugcccaagaguuc

SEQ ID NO: 3036 - RNA, 19 nt, Artificial Sequence
  Synthetic
cgggauuguuucaaccuuu

SEQ ID NO: 3037 - RNA, 19 nt, Artificial Sequence
  Synthetic
cugaugaacggcucaagaa

SEQ ID NO: 3038 - RNA, 19 nt, Artificial Sequence
  Synthetic
augaacggcucaagaaacu

SEQ ID NO: 3039 - RNA, 19 nt, Artificial Sequence
  Synthetic
cugcaaaggugaugacaau

SEQ ID NO: 3040 - RNA, 19 nt, Artificial Sequence
  Synthetic
ccaaggaggagcagcgaaa

SEQ ID NO: 3041 - RNA, 19 nt, Artificial Sequence
  Synthetic
ugacaaagacauggaaaua

SEQ ID NO: 3042 - RNA, 19 nt, Artificial Sequence
  Synthetic
ggacuacaucuaugacaaa

SEQ ID NO: 3043 - RNA, 19 nt, Artificial Sequence
  Synthetic
ccacaaagcagcucacuau

SEQ ID NO: 3044 - RNA, 19 nt, Artificial Sequence
  Synthetic
cagcgaaaagcuuggaaaa

SEQ ID NO: 3045 - RNA, 19 nt, Artificial Sequence
  Synthetic
gcaaaccgguucagugcua

SEQ ID NO: 3046 - RNA, 19 nt, Artificial Sequence
  Synthetic
augacaaagacauggaaau

SEQ ID NO: 3047 - RNA, 19 nt, Artificial Sequence
  Synthetic
gcgagggcaacgugguaaa

SEQ ID NO: 3048 - RNA, 19 nt, Artificial Sequence
  Synthetic
aggacuacaucuaugacaa

SEQ ID NO: 3049 - RNA, 19 nt, Artificial Sequence
  Synthetic
caacaaugacaacaaguau

SEQ ID NO: 3050 - RNA, 19 nt, Artificial Sequence
  Synthetic
acugagagccuaugacaau

SEQ ID NO: 3051 - RNA, 19 nt, Artificial Sequence
  Synthetic
caaccaaacgggagcuuga

SEQ ID NO: 3052 - RNA, 19 nt, Artificial Sequence
  Synthetic
ccgaaaaggagaaagauca

SEQ ID NO: 3053 - RNA, 19 nt, Artificial Sequence
  Synthetic
ggagaaagaucaccucgaa

SEQ ID NO: 3054 - RNA, 19 nt, Artificial Sequence
  Synthetic
guggacaacuggaagcaga

SEQ ID NO: 3055 - RNA, 19 nt, Artificial Sequence
  Synthetic
agcaaagagagcaggauga

SEQ ID NO: 3056 - RNA, 19 nt, Artificial Sequence
  Synthetic
gcaaagagagcaggaugaa

SEQ ID NO: 3057 - RNA, 19 nt, Artificial Sequence
  Synthetic
gcagcagcgccaagaucaa

SEQ ID NO: 3058 - RNA, 19 nt, Artificial Sequence
  Synthetic
gacaaagacauggaaauaa

SEQ ID NO: 3059 - RNA, 19 nt, Artificial Sequence
  Synthetic
ucacaaagaagcauauuca

SEQ ID NO: 3060 - RNA, 19 nt, Artificial Sequence
  Synthetic
cggacagucucaacaauga

SEQ ID NO: 3061 - RNA, 19 nt, Artificial Sequence
  Synthetic
gcaaggcguuggagagaag

SEQ ID NO: 3062 - RNA, 19 nt, Artificial Sequence
  Synthetic
gcagcuucaagguggacaa

SEQ ID NO: 3063 - RNA, 19 nt, Artificial Sequence
  Synthetic
ccucacuguuucaggaguu

SEQ ID NO: 3064 - RNA, 19 nt, Artificial Sequence
  Synthetic
aaauaaucgccaaggagga

SEQ ID NO: 3065 - RNA, 19 nt, Artificial Sequence
  Synthetic
gcaucauagaccagaucuu

SEQ ID NO: 3066 - RNA, 19 nt, Artificial Sequence
  Synthetic
ucaacaaugacaacaagua

SEQ ID NO: 3067 - RNA, 19 nt, Artificial Sequence
  Synthetic
gaagcauauucacgagcau

SEQ ID NO: 3068 - RNA, 19 nt, Artificial Sequence
  Synthetic
gagcgagggcaacguggua

SEQ ID NO: 3069 - RNA, 19 nt, Artificial Sequence
  Synthetic
ccaacuacuucaugaaaua

SEQ ID NO: 3070 - RNA, 19 nt, Artificial Sequence
  Synthetic
ccucaugaguuaaagaaua

SEQ ID NO: 3071 - RNA, 19 nt, Artificial Sequence
  Synthetic
cuauagaggcucacaguaa

SEQ ID NO: 3072 - RNA, 19 nt, Artificial Sequence
  Synthetic
ugacacaguuauagaagaa

SEQ ID NO: 3073 - RNA, 19 nt, Artificial Sequence
  Synthetic
gaacaaauccuuacaguga

SEQ ID NO: 3074 - RNA, 19 nt, Artificial Sequence
  Synthetic
gaauguugcuccuggcaua

SEQ ID NO: 3075 - RNA, 19 nt, Artificial Sequence
  Synthetic
ggacgagaauugauaaaga

SEQ ID NO: 3076 - RNA, 19 nt, Artificial Sequence
  Synthetic
gagauuacuuggcuggaua

SEQ ID NO: 3077 - RNA, 19 nt, Artificial Sequence
  Synthetic
gagaacagcaggaugcaua

SEQ ID NO: 3078 - RNA, 19 nt, Artificial Sequence
  Synthetic
gccaaauccuucugugaaa

SEQ ID NO: 3079 - RNA, 19 nt, Artificial Sequence
  Synthetic
gggaguagccagccaauua

SEQ ID NO: 3080 - RNA, 19 nt, Artificial Sequence
  Synthetic
ggaugaauaccucaagaaa

SEQ ID NO: 3081 - RNA, 19 nt, Artificial Sequence
  Synthetic
aaagcaagcugcaguacua

SEQ ID NO: 3082 - RNA, 19 nt, Artificial Sequence
  Synthetic
gaaaaugccugcucgaaua

SEQ ID NO: 3083 - RNA, 19 nt, Artificial Sequence
  Synthetic
cuacgaugcuugaagauga

SEQ ID NO: 3084 - RNA, 19 nt, Artificial Sequence
  Synthetic
gaauagagauguauacagu

SEQ ID NO: 3085 - RNA, 19 nt, Artificial Sequence
  Synthetic
agaagaagaugucagaaca

SEQ ID NO: 3086 - RNA, 19 nt, Artificial Sequence
  Synthetic
ggaaaugcuugguucauca

SEQ ID NO: 3087 - RNA, 19 nt, Artificial Sequence
  Synthetic
gggaaucuguguucgacaa

SEQ ID NO: 3088 - RNA, 19 nt, Artificial Sequence
  Synthetic
caacuugauucuuuaggaa

SEQ ID NO: 3089 - RNA, 19 nt, Artificial Sequence
  Synthetic
uugaucagauggaugaaua

SEQ ID NO: 3090 - RNA, 19 nt, Artificial Sequence
  Synthetic
ucacaguaaugaaaccaua

SEQ ID NO: 3091 - RNA, 19 nt, Artificial Sequence
  Synthetic
guucuaagcuccaaacuca

SEQ ID NO: 3092 - RNA, 19 nt, Artificial Sequence
  Synthetic
cgaaacagacucagcaguu

SEQ ID NO: 3093 - RNA, 19 nt, Artificial Sequence
  Synthetic
gaaaaggaccuguauuaaa

SEQ ID NO: 3094 - RNA, 19 nt, Artificial Sequence
  Synthetic
aaacaaacccauacacuga

SEQ ID NO: 3095 - RNA, 19 nt, Artificial Sequence
  Synthetic
gaaaagagaauaacaguga

SEQ ID NO: 3096 - RNA, 19 nt, Artificial Sequence
  Synthetic
agggaaaccuuaccuguua

SEQ ID NO: 3097 - RNA, 19 nt, Artificial Sequence
  Synthetic
ccacagcuuuguugaauga

SEQ ID NO: 3098 - RNA, 19 nt, Artificial Sequence
  Synthetic
uuaccaaggaguuugauua

SEQ ID NO: 3099 - RNA, 19 nt, Artificial Sequence
  Synthetic
gcacagaaacagagaaaua

SEQ ID NO: 3100 - RNA, 19 nt, Artificial Sequence
  Synthetic
uggaauaacugaugaggaa

SEQ ID NO: 3101 - RNA, 19 nt, Artificial Sequence
  Synthetic
gggaagagcuagugaggga

SEQ ID NO: 3102 - RNA, 19 nt, Artificial Sequence
  Synthetic
gggaguacuugaagguaaa

SEQ ID NO: 3103 - RNA, 19 nt, Artificial Sequence
  Synthetic
cuguagaagauaugagaaa

SEQ ID NO: 3104 - RNA, 19 nt, Artificial Sequence
  Synthetic
gggaagagaucaagagacu

SEQ ID NO: 3105 - RNA, 19 nt, Artificial Sequence
  Synthetic
gcuaaagaauguuggcaau

SEQ ID NO: 3106 - RNA, 19 nt, Artificial Sequence
  Synthetic
gaaaguugcucaagccaaa

SEQ ID NO: 3107 - RNA, 19 nt, Artificial Sequence
  Synthetic
gauaaaaccugaagaagua

SEQ ID NO: 3108 - RNA, 19 nt, Artificial Sequence
  Synthetic
aacaaaggcuagaaagaua

SEQ ID NO: 3109 - RNA, 19 nt, Artificial Sequence
  Synthetic
ggcaauacuuguugguuua

SEQ ID NO: 3110 - RNA, 19 nt, Artificial Sequence
  Synthetic
uauaggaaauucagggaaa

SEQ ID NO: 3111 - RNA, 19 nt, Artificial Sequence
  Synthetic
caucaggauuauaggaaau

SEQ ID NO: 3112 - RNA, 19 nt, Artificial Sequence
  Synthetic
cauuauuacugguggauga

SEQ ID NO: 3113 - RNA, 19 nt, Artificial Sequence
  Synthetic
cagaaagcuuugcaggaaa

SEQ ID NO: 3114 - RNA, 19 nt, Artificial Sequence
  Synthetic
acagauacaugcacagaaa

SEQ ID NO: 3115 - RNA, 19 nt, Artificial Sequence
  Synthetic
gcagauggaugaaguacaa

SEQ ID NO: 3116 - RNA, 19 nt, Artificial Sequence
  Synthetic
gcaucaggauuauaggaaa

SEQ ID NO: 3117 - RNA, 19 nt, Artificial Sequence
  Synthetic
ggacagaaauagaaaauga

SEQ ID NO: 3118 - RNA, 19 nt, Artificial Sequence
  Synthetic
ccagcauagcagagaauaa

SEQ ID NO: 3119 - RNA, 19 nt, Artificial Sequence
  Synthetic
gguaaauccaggaguguau

SEQ ID NO: 3120 - RNA, 19 nt, Artificial Sequence
  Synthetic
uggagaggaucgagaagua

SEQ ID NO: 3121 - RNA, 19 nt, Artificial Sequence
  Synthetic
ugggaguacuugaagguaa

SEQ ID NO: 3122 - RNA, 19 nt, Artificial Sequence
  Synthetic
ccaccggauuugagagauu

SEQ ID NO: 3123 - RNA, 19 nt, Artificial Sequence
  Synthetic
cgugaaagcagauggauga

SEQ ID NO: 3124 - RNA, 19 nt, Artificial Sequence
  Synthetic
gagcauugguuuacugaau

SEQ ID NO: 3125 - RNA, 19 nt, Artificial Sequence
  Synthetic
ggaauuugccucaaguaaa

SEQ ID NO: 3126 - RNA, 19 nt, Artificial Sequence
  Synthetic
aggcaauuaaguuggaaua

SEQ ID NO: 3127 - RNA, 19 nt, Artificial Sequence
  Synthetic
gaaccaggcaccaaagaaa

SEQ ID NO: 3128 - RNA, 19 nt, Artificial Sequence
  Synthetic
gagcaauugccuugaguuu

SEQ ID NO: 3129 - RNA, 19 nt, Artificial Sequence
  Synthetic
ccacaaagcuggagguaaa

SEQ ID NO: 3130 - RNA, 19 nt, Artificial Sequence
  Synthetic
ccacaaaguugaugagaaa

SEQ ID NO: 3131 - RNA, 19 nt, Artificial Sequence
  Synthetic
cagaagagcuugaguauaa

SEQ ID NO: 3132 - RNA, 19 nt, Artificial Sequence
  Synthetic
aagcuauaaucgagagaaa

SEQ ID NO: 3133 - RNA, 19 nt, Artificial Sequence
  Synthetic
acaaaggaauccaaagaua

SEQ ID NO: 3134 - RNA, 19 nt, Artificial Sequence
  Synthetic
gaacgaugcucaugaguuu

SEQ ID NO: 3135 - RNA, 19 nt, Artificial Sequence
  Synthetic
gagugaggauggagaaauu

SEQ ID NO: 3136 - RNA, 19 nt, Artificial Sequence
  Synthetic
gguuacacaaagugggaua

SEQ ID NO: 3137 - RNA, 19 nt, Artificial Sequence
  Synthetic
uaucagaauuccagaaaga

SEQ ID NO: 3138 - RNA, 19 nt, Artificial Sequence
  Synthetic
gcacaacacagaaggaaau

SEQ ID NO: 3139 - RNA, 19 nt, Artificial Sequence
  Synthetic
ccuaugacuuugagaaaca

SEQ ID NO: 3140 - RNA, 19 nt, Artificial Sequence
  Synthetic
gcaaaaguaccuuggaaaa

SEQ ID NO: 3141 - RNA, 19 nt, Artificial Sequence
  Synthetic
acacaaagugggauaaauu

SEQ ID NO: 3142 - RNA, 19 nt, Artificial Sequence
  Synthetic
cagcacaagaagaggaaaa

SEQ ID NO: 3143 - RNA, 19 nt, Artificial Sequence
  Synthetic
ccaauaagaauccaagaaa

SEQ ID NO: 3144 - RNA, 19 nt, Artificial Sequence
  Synthetic
ccacagaugcugaacaauu

SEQ ID NO: 3145 - RNA, 19 nt, Artificial Sequence
  Synthetic
gcuauaaucgagagaaaca

SEQ ID NO: 3146 - RNA, 19 nt, Artificial Sequence
  Synthetic
uugaagcaguggaaagaaa

SEQ ID NO: 3147 - RNA, 19 nt, Artificial Sequence
  Synthetic
ccuaagaccuacaaaauua

SEQ ID NO: 3148 - RNA, 19 nt, Artificial Sequence
  Synthetic
cugaaagauaacauggaaa

SEQ ID NO: 3149 - RNA, 19 nt, Artificial Sequence
  Synthetic
cagagaugaaugaggaauu

SEQ ID NO: 3150 - RNA, 19 nt, Artificial Sequence
  Synthetic
gagaaaucaaguagcaaau

SEQ ID NO: 3151 - RNA, 19 nt, Artificial Sequence
  Synthetic
gaaaugaugauaagggaga

SEQ ID NO: 3152 - RNA, 19 nt, Artificial Sequence
  Synthetic
gagagaaacaauugaaguu

SEQ ID NO: 3153 - RNA, 19 nt, Artificial Sequence
  Synthetic
uggaaagaaagaagaaaga

SEQ ID NO: 3154 - RNA, 19 nt, Artificial Sequence
  Synthetic
caacaaaggaauccaaaga

SEQ ID NO: 3155 - RNA, 19 nt, Artificial Sequence
  Synthetic
cuguuuagaucaacugaaa

SEQ ID NO: 3156 - RNA, 19 nt, Artificial Sequence
  Synthetic
gagcagaagagcuugagua

SEQ ID NO: 3157 - RNA, 19 nt, Artificial Sequence
  Synthetic
ccgaaaauccaaaacgaaa

SEQ ID NO: 3158 - RNA, 19 nt, Artificial Sequence
  Synthetic
gcagaagacagcagcaaaa

SEQ ID NO: 3159 - RNA, 19 nt, Artificial Sequence
  Synthetic
gggaagaaguugaaagaga

SEQ ID NO: 3160 - RNA, 19 nt, Artificial Sequence
  Synthetic
ccauugaggucaugagaaa

SEQ ID NO: 3161 - RNA, 19 nt, Artificial Sequence
  Synthetic
ggacaagagcguugguuua

SEQ ID NO: 3162 - RNA, 19 nt, Artificial Sequence
  Synthetic
uggaaagguaugugaaaua

SEQ ID NO: 3163 - RNA, 19 nt, Artificial Sequence
  Synthetic
ucacagaugaggagauaaa

SEQ ID NO: 3164 - RNA, 19 nt, Artificial Sequence
  Synthetic
aagcgaaacugaaggaaau

SEQ ID NO: 3165 - RNA, 19 nt, Artificial Sequence
  Synthetic
gcaaggagcuuauucgaaa

SEQ ID NO: 3166 - RNA, 19 nt, Artificial Sequence
  Synthetic
ggcaauacauguugguuua

SEQ ID NO: 3167 - RNA, 19 nt, Artificial Sequence
  Synthetic
ggaacaguuugcagauaaa

SEQ ID NO: 3168 - RNA, 19 nt, Artificial Sequence
  Synthetic
gaagguggcucaagcgaaa

SEQ ID NO: 3169 - RNA, 19 nt, Artificial Sequence
  Synthetic
gaaauaagagagaguguau

SEQ ID NO: 3170 - RNA, 19 nt, Artificial Sequence
  Synthetic
cuguggaacucaagcauua

SEQ ID NO: 3171 - RNA, 19 nt, Artificial Sequence
  Synthetic
gaaaguugaaggaggaaau

SEQ ID NO: 3172 - RNA, 19 nt, Artificial Sequence
  Synthetic
ggaagaaguugaaagagau

SEQ ID NO: 3173 - RNA, 19 nt, Artificial Sequence
  Synthetic
ggcagaaagcaguguauua

SEQ ID NO: 3174 - RNA, 19 nt, Artificial Sequence
  Synthetic
aguugaaggaggaaauaaa

SEQ ID NO: 3175 - RNA, 19 nt, Artificial Sequence
  Synthetic
gaccagacauccaaggaaa

SEQ ID NO: 3176 - RNA, 19 nt, Artificial Sequence
  Synthetic
acaaggaaguauuagcaaa

SEQ ID NO: 3177 - RNA, 19 nt, Artificial Sequence
  Synthetic
agaaguggcaugaagauua

SEQ ID NO: 3178 - RNA, 19 nt, Artificial Sequence
  Synthetic
gagagaaaucacaggcauu

SEQ ID NO: 3179 - RNA, 19 nt, Artificial Sequence
  Synthetic
ugucgaagucauacagaaa

SEQ ID NO: 3180 - RNA, 19 nt, Artificial Sequence
  Synthetic
caagcgaaacugaaggaaa

SEQ ID NO: 3181 - RNA, 19 nt, Artificial Sequence
  Synthetic
cagcaagaugugagugaau

SEQ ID NO: 3182 - RNA, 19 nt, Artificial Sequence
  Synthetic
uggaacaguuugcagauaa

SEQ ID NO: 3183 - RNA, 19 nt, Artificial Sequence
  Synthetic
gauuauaguuuguuccgaa

SEQ ID NO: 3184 - RNA, 19 nt, Artificial Sequence
  Synthetic
ugaauauggaagaguacaa

SEQ ID NO: 3185 - RNA, 19 nt, Artificial Sequence
  Synthetic
cuaaacgcucaaagagaaa

SEQ ID NO: 3186 - RNA, 19 nt, Artificial Sequence
  Synthetic
ggagugagauugaacaaga

SEQ ID NO: 3187 - RNA, 19 nt, Artificial Sequence
  Synthetic
aauucaagcugauggaaga

SEQ ID NO: 3188 - RNA, 19 nt, Artificial Sequence
  Synthetic
gcaacuuagacgaguguuu

SEQ ID NO: 3189 - RNA, 19 nt, Artificial Sequence
  Synthetic
guacaaagaucaagagaga

SEQ ID NO: 3190 - RNA, 19 nt, Artificial Sequence
  Synthetic
ggaauaugcugaaggaaau

SEQ ID NO: 3191 - RNA, 19 nt, Artificial Sequence
  Synthetic
aggaauaugcugaaggaaa

SEQ ID NO: 3192 - RNA, 19 nt, Artificial Sequence
  Synthetic
agacagauuccuugaaaua

SEQ ID NO: 3193 - RNA, 19 nt, Artificial Sequence
  Synthetic
acaaagaucaagagagaau

SEQ ID NO: 3194 - RNA, 19 nt, Artificial Sequence
  Synthetic
auacaaagcaauaggaaga

SEQ ID NO: 3195 - RNA, 19 nt, Artificial Sequence
  Synthetic
ccaaggaacuaacaagaaa

SEQ ID NO: 3196 - RNA, 19 nt, Artificial Sequence
  Synthetic
caucaaguuuagaggauuu

SEQ ID NO: 3197 - RNA, 19 nt, Artificial Sequence
  Synthetic
caugaaaguuugaagaaca

SEQ ID NO: 3198 - RNA, 19 nt, Artificial Sequence
  Synthetic
ggaugaaaucucaaugaaa

SEQ ID NO: 3199 - RNA, 19 nt, Artificial Sequence
  Synthetic
ugaaagaagacauggaaaa

SEQ ID NO: 3200 - RNA, 19 nt, Artificial Sequence
  Synthetic
gaugauaucucuaaaggua

SEQ ID NO: 3201 - RNA, 19 nt, Artificial Sequence
  Synthetic
caaucagucuacagaauua

SEQ ID NO: 3202 - RNA, 19 nt, Artificial Sequence
  Synthetic
ggugaagaauaacgagcaa

SEQ ID NO: 3203 - RNA, 19 nt, Artificial Sequence
  Synthetic
gugcaaagacaaaaggaaa

SEQ ID NO: 3204 - RNA, 19 nt, Artificial Sequence
  Synthetic
uugaggagcuguuaagaaa

SEQ ID NO: 3205 - RNA, 19 nt, Artificial Sequence
  Synthetic
gcuagggacugauuagaaa

SEQ ID NO: 3206 - RNA, 19 nt, Artificial Sequence
  Synthetic
gcugaaggaaauugacaaa

SEQ ID NO: 3207 - RNA, 19 nt, Artificial Sequence
  Synthetic
gaaacagugcaaagacaaa

SEQ ID NO: 3208 - RNA, 19 nt, Artificial Sequence
  Synthetic
gguugcuggugaagaauaa

SEQ ID NO: 3209 - RNA, 19 nt, Artificial Sequence
  Synthetic
aagaagaagagcuugaaua

SEQ ID NO: 3210 - RNA, 19 nt, Artificial Sequence
  Synthetic
uuguaaagcuuguggucau

SEQ ID NO: 3211 - RNA, 19 nt, Artificial Sequence
  Synthetic
agaagaagagcuugaauau

SEQ ID NO: 3212 - RNA, 19 nt, Artificial Sequence
  Synthetic
gagagaauuacuugggaau

SEQ ID NO: 3213 - RNA, 19 nt, Artificial Sequence
  Synthetic
guaugaagauggagggaag

SEQ ID NO: 3214 - RNA, 19 nt, Artificial Sequence
  Synthetic
cuuuaaagaagaagagcuu

SEQ ID NO: 3215 - RNA, 19 nt, Artificial Sequence
  Synthetic
ccagagagacuguggagau

SEQ ID NO: 3216 - RNA, 19 nt, Artificial Sequence
  Synthetic
cagaagaugccuuuguuua

SEQ ID NO: 3217 - RNA, 19 nt, Artificial Sequence
  Synthetic
cugaaagaagacauggaaa

SEQ ID NO: 3218 - RNA, 19 nt, Artificial Sequence
  Synthetic
ggaaaauggcucugcacua

SEQ ID NO: 3219 - RNA, 19 nt, Artificial Sequence
  Synthetic
guagaagaguuuagaaaga

SEQ ID NO: 3220 - RNA, 19 nt, Artificial Sequence
  Synthetic
ggaguuaaggaaugggaaa

SEQ ID NO: 3221 - RNA, 19 nt, Artificial Sequence
  Synthetic
gugaugauuuugugguuaa

SEQ ID NO: 3222 - RNA, 19 nt, Artificial Sequence
  Synthetic
ugguagaagaguuuagaaa

SEQ ID NO: 3223 - RNA, 19 nt, Artificial Sequence
  Synthetic
ggacagcauauuuaagaaa

SEQ ID NO: 3224 - RNA, 19 nt, Artificial Sequence
  Synthetic
agaagaacuugaugagaca

SEQ ID NO: 3225 - RNA, 19 nt, Artificial Sequence
  Synthetic
gggacagaaucuagaaagu

SEQ ID NO: 3226 - RNA, 19 nt, Artificial Sequence
  Synthetic
cacaaugacugcugaggaa

SEQ ID NO: 3227 - RNA, 19 nt, Artificial Sequence
  Synthetic
uaacaaagggcaucauuaa

SEQ ID NO: 3228 - RNA, 19 nt, Artificial Sequence
  Synthetic
ccaagucaguucagaagua

SEQ ID NO: 3229 - RNA, 19 nt, Artificial Sequence
  Synthetic
ccacaaaauuucacaauga

SEQ ID NO: 3230 - RNA, 19 nt, Artificial Sequence
  Synthetic
ggccaaagcuggaucggau

SEQ ID NO: 3231 - RNA, 19 nt, Artificial Sequence
  Synthetic
cuagaaaguuugauccauu

SEQ ID NO: 3232 - RNA, 19 nt, Artificial Sequence
  Synthetic
gacagaaucuagaaaguuu

SEQ ID NO: 3233 - RNA, 19 nt, Artificial Sequence
  Synthetic
gagaacacuuacagaacuu

SEQ ID NO: 3234 - RNA, 19 nt, Artificial Sequence
  Synthetic
gcucuaagaaucaagaaaa

SEQ ID NO: 3235 - RNA, 19 nt, Artificial Sequence
  Synthetic
acucaacacuaaacagcaa

SEQ ID NO: 3236 - RNA, 19 nt, Artificial Sequence
  Synthetic
ggcuauauucggaggcauu

SEQ ID NO: 3237 - RNA, 19 nt, Artificial Sequence
  Synthetic
agacuguggugaaggcgaa

SEQ ID NO: 3238 - RNA, 19 nt, Artificial Sequence
  Synthetic
ccaugaauucaaugcgcua

SEQ ID NO: 3239 - RNA, 19 nt, Artificial Sequence
  Synthetic
gggauaacaaugugucuuu

SEQ ID NO: 3240 - RNA, 19 nt, Artificial Sequence
  Synthetic
agaagaguuuagaaagaca

SEQ ID NO: 3241 - RNA, 19 nt, Artificial Sequence
  Synthetic
uugcauaaauggagcaucu

SEQ ID NO: 3242 - RNA, 19 nt, Artificial Sequence
  Synthetic
acgaggagacuguggugaa

SEQ ID NO: 3243 - RNA, 19 nt, Artificial Sequence
  Synthetic
guacagaaagucagagaac

SEQ ID NO: 3244 - RNA, 19 nt, Artificial Sequence
  Synthetic
uugaugagacagaguuaua

SEQ ID NO: 3245 - RNA, 19 nt, Artificial Sequence
  Synthetic
gcugaaagcaagauguguu

SEQ ID NO: 3246 - RNA, 19 nt, Artificial Sequence
  Synthetic
acacuaaacagcaaguuau

SEQ ID NO: 3247 - RNA, 19 nt, Artificial Sequence
  Synthetic
ccaaagcuggaucggauaa

SEQ ID NO: 3248 - RNA, 19 nt, Artificial Sequence
  Synthetic
cguagaauuuccacugaga

SEQ ID NO: 3249 - RNA, 19 nt, Artificial Sequence
  Synthetic
guacaaagauugaagccaa

SEQ ID NO: 3250 - RNA, 19 nt, Artificial Sequence
  Synthetic
gaaauaacucccaaacaaa

SEQ ID NO: 3251 - RNA, 19 nt, Artificial Sequence
  Synthetic
gggaguuauagguggaauu

SEQ ID NO: 3252 - RNA, 19 nt, Artificial Sequence
  Synthetic
cauuggaagaugagcgaga

SEQ ID NO: 3253 - RNA, 19 nt, Artificial Sequence
  Synthetic
ggacauaaaccuagucaac

SEQ ID NO: 3254 - RNA, 19 nt, Artificial Sequence
  Synthetic
acagaaagaaagaagcgua

SEQ ID NO: 3255 - RNA, 19 nt, Artificial Sequence
  Synthetic
caucagaaucagugcggga

SEQ ID NO: 3256 - RNA, 19 nt, Artificial Sequence
  Synthetic
gcgccuaccugcuguucua

SEQ ID NO: 3257 - RNA, 19 nt, Artificial Sequence
  Synthetic
gaacaagaacccagggccu

SEQ ID NO: 3258 - RNA, 19 nt, Artificial Sequence
  Synthetic
ugauggacauuuacaagua

SEQ ID NO: 3259 - RNA, 19 nt, Artificial Sequence
  Synthetic
uguuggaugucuuaagaau

SEQ ID NO: 3260 - RNA, 19 nt, Artificial Sequence
  Synthetic
aagaaagaagcguagaaaa

SEQ ID NO: 3261 - RNA, 19 nt, Artificial Sequence
  Synthetic
agaaagaagcguagaaaag

SEQ ID NO: 3262 - RNA, 19 nt, Artificial Sequence
  Synthetic
gccaagaaguuacugauga

SEQ ID NO: 3263 - RNA, 19 nt, Artificial Sequence
  Synthetic
ggauaaaggaaaagcaaaa

SEQ ID NO: 3264 - RNA, 19 nt, Artificial Sequence
  Synthetic
gugcaagauuuuagaaaga

SEQ ID NO: 3265 - RNA, 19 nt, Artificial Sequence
  Synthetic
caaauuuguuccaggauaa

SEQ ID NO: 3266 - RNA, 19 nt, Artificial Sequence
  Synthetic
ggacaaggaagaagcuaaa

SEQ ID NO: 3267 - RNA, 19 nt, Artificial Sequence
  Synthetic
gaagaaggguuuaaaggua

SEQ ID NO: 3268 - RNA, 19 nt, Artificial Sequence
  Synthetic
gaaaagaagaggaggaauu

SEQ ID NO: 3269 - RNA, 19 nt, Artificial Sequence
  Synthetic
caguaaagggcgauggauu

SEQ ID NO: 3270 - RNA, 19 nt, Artificial Sequence
  Synthetic
gcaggaugcucaagaauuu

SEQ ID NO: 3271 - RNA, 19 nt, Artificial Sequence
  Synthetic
ccaaauuuguuccaggaua

SEQ ID NO: 3272 - RNA, 19 nt, Artificial Sequence
  Synthetic
ccauaaaguuguggauaau

SEQ ID NO: 3273 - RNA, 19 nt, Artificial Sequence
  Synthetic
gcaaacuggacauaagaaa

SEQ ID NO: 3274 - RNA, 19 nt, Artificial Sequence
  Synthetic
guuuaaagguacuggucuu

SEQ ID NO: 3275 - RNA, 19 nt, Artificial Sequence
  Synthetic
aagaagaggaggaauuaaa

SEQ ID NO: 3276 - RNA, 19 nt, Artificial Sequence
  Synthetic
cugaaacagaggaggacaa

SEQ ID NO: 3277 - RNA, 19 nt, Artificial Sequence
  Synthetic
ggcggaaauuuguuagaaa

SEQ ID NO: 3278 - RNA, 19 nt, Artificial Sequence
  Synthetic
aguagaacguugucgcaua

SEQ ID NO: 3279 - RNA, 19 nt, Artificial Sequence
  Synthetic
acagcaagucugaggacaa

SEQ ID NO: 3280 - RNA, 19 nt, Artificial Sequence
  Synthetic
augcaaauacaacgggaaa

SEQ ID NO: 3281 - RNA, 19 nt, Artificial Sequence
  Synthetic
cuucaagacuauuguguca

SEQ ID NO: 3282 - RNA, 19 nt, Artificial Sequence
  Synthetic
ugucagaaacagagcaaca

SEQ ID NO: 3283 - RNA, 19 nt, Artificial Sequence
  Synthetic
ucguagauacacagagcaa

SEQ ID NO: 3284 - RNA, 19 nt, Artificial Sequence
  Synthetic
caaagaaaccagagagcac

SEQ ID NO: 3285 - RNA, 19 nt, Artificial Sequence
  Synthetic
uuguaaauacugaggauga

SEQ ID NO: 3286 - RNA, 19 nt, Artificial Sequence
  Synthetic
auuuaggccugaaggaauu

SEQ ID NO: 3287 - RNA, 19 nt, Artificial Sequence
  Synthetic
aggcaaagaugaagagaaa

SEQ ID NO: 3288 - RNA, 19 nt, Artificial Sequence
  Synthetic
ggagauauccuguggguua

SEQ ID NO: 3289 - RNA, 19 nt, Artificial Sequence
  Synthetic
guaaauggucgguggauaa

SEQ ID NO: 3290 - RNA, 19 nt, Artificial Sequence
  Synthetic
gaucaauuguuguggauuu

SEQ ID NO: 3291 - RNA, 19 nt, Artificial Sequence
  Synthetic
ggacaaauuauuagaggau

SEQ ID NO: 3292 - RNA, 19 nt, Artificial Sequence
  Synthetic
ggaagaagaaggacaaauu

SEQ ID NO: 3293 - RNA, 19 nt, Artificial Sequence
  Synthetic
gaauacuacagaagagaaa

SEQ ID NO: 3294 - RNA, 19 nt, Artificial Sequence
  Synthetic
gcauuaaagaggaagauau

SEQ ID NO: 3295 - RNA, 19 nt, Artificial Sequence
  Synthetic
cagcuaagaucucaaguaa

SEQ ID NO: 3296 - RNA, 19 nt, Artificial Sequence
  Synthetic
gcauauaaguguccgauuu

SEQ ID NO: 3297 - RNA, 19 nt, Artificial Sequence
  Synthetic
ggacaaaucccauugguau

SEQ ID NO: 3298 - RNA, 19 nt, Artificial Sequence
  Synthetic
guacaugguuccaacauaa

SEQ ID NO: 3299 - RNA, 19 nt, Artificial Sequence
  Synthetic
gagaaacgcuauugguuau

SEQ ID NO: 3300 - RNA, 19 nt, Artificial Sequence
  Synthetic
aguaaaggcuacaucauua

SEQ ID NO: 3301 - RNA, 19 nt, Artificial Sequence
  Synthetic
uggcaagggaggugaagaa

SEQ ID NO: 3302 - RNA, 19 nt, Artificial Sequence
  Synthetic
uggcaacaguggaaagaau

SEQ ID NO: 3303 - RNA, 19 nt, Artificial Sequence
  Synthetic
acuagaaggaggacgauua

SEQ ID NO: 3304 - RNA, 19 nt, Artificial Sequence
  Synthetic
gaacuauguuauacgggaa

SEQ ID NO: 3305 - RNA, 19 nt, Artificial Sequence
  Synthetic
ucacaaauggaaugguuaa

SEQ ID NO: 3306 - RNA, 19 nt, Artificial Sequence
  Synthetic
uaucaaacaucccaggaaa

SEQ ID NO: 3307 - RNA, 19 nt, Artificial Sequence
  Synthetic
caguauggaugaagacuuu

SEQ ID NO: 3308 - RNA, 19 nt, Artificial Sequence
  Synthetic
ggacaaccaucuaagaaga

SEQ ID NO: 3309 - RNA, 19 nt, Artificial Sequence
  Synthetic
guggaaagaauaugucaaa

SEQ ID NO: 3310 - RNA, 19 nt, Artificial Sequence
  Synthetic
ugauauuguagaaggcaua

SEQ ID NO: 3311 - RNA, 19 nt, Artificial Sequence
  Synthetic
augcagaccaucaaggaaa

SEQ ID NO: 3312 - RNA, 19 nt, Artificial Sequence
  Synthetic
acgauuugauuuagagaca

SEQ ID NO: 3313 - RNA, 19 nt, Artificial Sequence
  Synthetic
cagcagagcuucagaauau

SEQ ID NO: 3314 - RNA, 19 nt, Artificial Sequence
  Synthetic
uuuugaaagucuugggaaa

SEQ ID NO: 3315 - RNA, 19 nt, Artificial Sequence
  Synthetic
caacagugauagagcagaa

SEQ ID NO: 3316 - RNA, 19 nt, Artificial Sequence
  Synthetic
aaagagaagaugugcaaua

SEQ ID NO: 3317 - RNA, 19 nt, Artificial Sequence
  Synthetic
agacaauggaagaagacaa

SEQ ID NO: 3318 - RNA, 19 nt, Artificial Sequence
  Synthetic
agacauauuugauggaaca

SEQ ID NO: 3319 - RNA, 19 nt, Artificial Sequence
  Synthetic
ggaaauacuuguuacauga

SEQ ID NO: 3320 - RNA, 19 nt, Artificial Sequence
  Synthetic
cagcucaaauugugacaua

SEQ ID NO: 3321 - RNA, 19 nt, Artificial Sequence
  Synthetic
uggaauaugugaagagguu

SEQ ID NO: 3322 - RNA, 19 nt, Artificial Sequence
  Synthetic
agucauggaaguagaagaa

SEQ ID NO: 3323 - RNA, 19 nt, Artificial Sequence
  Synthetic
aaagagaggagaaggauau

SEQ ID NO: 3324 - RNA, 19 nt, Artificial Sequence
  Synthetic
ucagaaaugucaaaggauu

SEQ ID NO: 3325 - RNA, 19 nt, Artificial Sequence
  Synthetic
aguaaauucugaaggcgaa

SEQ ID NO: 3326 - RNA, 19 nt, Artificial Sequence
  Synthetic
cgacaguggcuuaauaaau

SEQ ID NO: 3327 - RNA, 19 nt, Artificial Sequence
  Synthetic
cugaaacagucgacuuaaa

SEQ ID NO: 3328 - RNA, 19 nt, Artificial Sequence
  Synthetic
ggacuagcucgaacagaua

SEQ ID NO: 3329 - RNA, 19 nt, Artificial Sequence
  Synthetic
gggcaugucuggagaauag

SEQ ID NO: 3330 - RNA, 19 nt, Artificial Sequence
  Synthetic
ucauggaaguagaagaaga

SEQ ID NO: 3331 - RNA, 19 nt, Artificial Sequence
  Synthetic
ggagaaggauaucaaauuu

SEQ ID NO: 3332 - RNA, 19 nt, Artificial Sequence
  Synthetic
ucauguugauccagauaua

SEQ ID NO: 3333 - RNA, 19 nt, Artificial Sequence
  Synthetic
uggaagaagacaagagcca

SEQ ID NO: 3334 - RNA, 19 nt, Artificial Sequence
  Synthetic
auauagaagcggaugaaga

SEQ ID NO: 3335 - RNA, 19 nt, Artificial Sequence
  Synthetic
ggaaacugucaaagugcaa

SEQ ID NO: 3336 - RNA, 19 nt, Artificial Sequence
  Synthetic
gaucauguggcgaagcaua

SEQ ID NO: 3337 - RNA, 19 nt, Artificial Sequence
  Synthetic
caauguuaauucaggauga

SEQ ID NO: 3338 - RNA, 19 nt, Artificial Sequence
  Synthetic
ggauauaguccaagaugaa

SEQ ID NO: 3339 - RNA, 19 nt, Artificial Sequence
  Synthetic
gcggaaagccauaggaaaa

SEQ ID NO: 3340 - RNA, 19 nt, Artificial Sequence
  Synthetic
cuacaaagcuagugcccua

SEQ ID NO: 3341 - RNA, 19 nt, Artificial Sequence
  Synthetic
cagguuaaguuuagagcaa

SEQ ID NO: 3342 - RNA, 19 nt, Artificial Sequence
  Synthetic
auagaaaguuagagaguca

SEQ ID NO: 3343 - RNA, 19 nt, Artificial Sequence
  Synthetic
gggaagaagaagaggagga

SEQ ID NO: 3344 - RNA, 19 nt, Artificial Sequence
  Synthetic
gggcauguuuuaagaaauu

SEQ ID NO: 3345 - RNA, 19 nt, Artificial Sequence
  Synthetic
caagcuaauaggagggaaa

SEQ ID NO: 3346 - RNA, 19 nt, Artificial Sequence
  Synthetic
gcauggaaccagaggaaga

SEQ ID NO: 3347 - RNA, 19 nt, Artificial Sequence
  Synthetic
gguucaaagucaaguguuu

SEQ ID NO: 3348 - RNA, 19 nt, Artificial Sequence
  Synthetic
gggaaagagugagaggaaa

SEQ ID NO: 3349 - RNA, 19 nt, Artificial Sequence
  Synthetic
gaagaaaguacgagcugaa

SEQ ID NO: 3350 - RNA, 19 nt, Artificial Sequence
  Synthetic
cggaauagaaaguuagaga

SEQ ID NO: 3351 - RNA, 19 nt, Artificial Sequence
  Synthetic
gagcaagaagccaaagaaa

SEQ ID NO: 3352 - RNA, 19 nt, Artificial Sequence
  Synthetic
ccuaauauguugauggcau

SEQ ID NO: 3353 - RNA, 19 nt, Artificial Sequence
  Synthetic
gcauauaauccuagaccuu

SEQ ID NO: 3354 - RNA, 19 nt, Artificial Sequence
  Synthetic
ggauaugggaggugauuga

SEQ ID NO: 3355 - RNA, 19 nt, Artificial Sequence
  Synthetic
ugggaaagagugagaggaa

SEQ ID NO: 3356 - RNA, 19 nt, Artificial Sequence
  Synthetic
gagaagaagaauuagaaga

SEQ ID NO: 3357 - RNA, 19 nt, Artificial Sequence
  Synthetic
auuaaagcacuguggaaua

SEQ ID NO: 3358 - RNA, 19 nt, Artificial Sequence
  Synthetic
cauauuuaauggagaguga

SEQ ID NO: 3359 - RNA, 19 nt, Artificial Sequence
  Synthetic
gaaccaaacaugugcaaca

SEQ ID NO: 3360 - RNA, 19 nt, Artificial Sequence
  Synthetic
agauaugagagaagaagaa

SEQ ID NO: 3361 - RNA, 19 nt, Artificial Sequence
  Synthetic
caaaagacucagagagcua

SEQ ID NO: 3362 - RNA, 19 nt, Artificial Sequence
  Synthetic
cagaaaggcauuugacauu

SEQ ID NO: 3363 - RNA, 19 nt, Artificial Sequence
  Synthetic
gagcuuacgaugugaagaa

SEQ ID NO: 3364 - RNA, 19 nt, Artificial Sequence
  Synthetic
caucugagacaguggcaaa

SEQ ID NO: 3365 - RNA, 19 nt, Artificial Sequence
  Synthetic
ccaaguauucagaggauau

SEQ ID NO: 3366 - RNA, 19 nt, Artificial Sequence
  Synthetic
ggaaagagugagaggaaag

SEQ ID NO: 3367 - RNA, 19 nt, Artificial Sequence
  Synthetic
ucucaugguuauagaaaga

SEQ ID NO: 3368 - RNA, 19 nt, Artificial Sequence
  Synthetic
ggauagagagggaggaaga

SEQ ID NO: 3369 - RNA, 19 nt, Artificial Sequence
  Synthetic
aagaagagaagguggagaa

SEQ ID NO: 3370 - RNA, 19 nt, Artificial Sequence
  Synthetic
aggaaaggauagagaggga

SEQ ID NO: 3371 - RNA, 19 nt, Artificial Sequence
  Synthetic
guggagaaggagacagaaa

SEQ ID NO: 3372 - RNA, 19 nt, Artificial Sequence
  Synthetic
uggaagaggaagaagagaa

SEQ ID NO: 3373 - RNA, 19 nt, Artificial Sequence
  Synthetic
aagagaagguggagaagga

SEQ ID NO: 3374 - RNA, 19 nt, Artificial Sequence
  Synthetic
aagacaaggaugaggauga

SEQ ID NO: 3375 - RNA, 19 nt, Artificial Sequence
  Synthetic
ggaaggagagagggagaaa

SEQ ID NO: 3376 - RNA, 19 nt, Artificial Sequence
  Synthetic
agaaagaggaggaggugga

SEQ ID NO: 3377 - RNA, 19 nt, Artificial Sequence
  Synthetic
ggaaagcaccagaggggaa

SEQ ID NO: 3378 - RNA, 19 nt, Artificial Sequence
  Synthetic
guuaagaaguucagcaucu

SEQ ID NO: 3379 - RNA, 19 nt, Artificial Sequence
  Synthetic
gggagaaagaggaggaggu

SEQ ID NO: 3380 - RNA, 19 nt, Artificial Sequence
  Synthetic
aaggagagagggagaaaga

SEQ ID NO: 3381 - RNA, 19 nt, Artificial Sequence
  Synthetic
ccgagaaggugguggagcu

SEQ ID NO: 3382 - RNA, 19 nt, Artificial Sequence
  Synthetic
aagaggaggagguggaaga

SEQ ID NO: 3383 - RNA, 19 nt, Artificial Sequence
  Synthetic
gcucggaguaucugaagua

SEQ ID NO: 3384 - RNA, 19 nt, Artificial Sequence
  Synthetic
agagcgagcuggcggguuu

SEQ ID NO: 3385 - RNA, 19 nt, Artificial Sequence
  Synthetic
aggaagaagggaaggagga

SEQ ID NO: 3386 - RNA, 19 nt, Artificial Sequence
  Synthetic
ggaggagguggaagaggaa

SEQ ID NO: 3387 - RNA, 19 nt, Artificial Sequence
  Synthetic
aggaggagguggaagagga

SEQ ID NO: 3388 - RNA, 19 nt, Artificial Sequence
  Synthetic
agagggaggaagaagggaa

SEQ ID NO: 3389 - RNA, 19 nt, Artificial Sequence
  Synthetic
aggaagaagagaaggugga

SEQ ID NO: 3390 - RNA, 19 nt, Artificial Sequence
  Synthetic
aggagguggaagaggaaga

SEQ ID NO: 3391 - RNA, 19 nt, Artificial Sequence
  Synthetic
agacaaggaugaggaugaa

SEQ ID NO: 3392 - RNA, 19 nt, Artificial Sequence
  Synthetic
ggaagaggaagaagagaag

SEQ ID NO: 3393 - RNA, 19 nt, Artificial Sequence
  Synthetic
agagaacggagaaggaaga

SEQ ID NO: 3394 - RNA, 19 nt, Artificial Sequence
  Synthetic
gagaagguggagaaggaga

SEQ ID NO: 3395 - RNA, 19 nt, Artificial Sequence
  Synthetic
agacagaaaaggaggcuga

SEQ ID NO: 3396 - RNA, 19 nt, Artificial Sequence
  Synthetic
agguggagaaggagacaga

SEQ ID NO: 3397 - RNA, 19 nt, Artificial Sequence
  Synthetic
agguggaagaggaagaaga

SEQ ID NO: 3398 - RNA, 19 nt, Artificial Sequence
  Synthetic
gggaagaggaagaggaaga

SEQ ID NO: 3399 - RNA, 19 nt, Artificial Sequence
  Synthetic
ggaagagucuccaaggaaa

SEQ ID NO: 3400 - RNA, 19 nt, Artificial Sequence
  Synthetic
ugauaaagcuuacgggaga

SEQ ID NO: 3401 - RNA, 19 nt, Artificial Sequence
  Synthetic
cguauaugucccagaauaa

SEQ ID NO: 3402 - RNA, 19 nt, Artificial Sequence
  Synthetic
ggaagaggaagaagaagaa

SEQ ID NO: 3403 - RNA, 19 nt, Artificial Sequence
  Synthetic
cuggaaagaaggugaagaa

SEQ ID NO: 3404 - RNA, 19 nt, Artificial Sequence
  Synthetic
aggaagaggaagaagaaga

SEQ ID NO: 3405 - RNA, 19 nt, Artificial Sequence
  Synthetic
aaagaaagcaggagacaca

SEQ ID NO: 3406 - RNA, 19 nt, Artificial Sequence
  Synthetic
ggacugagaccgugguuga

SEQ ID NO: 3407 - RNA, 19 nt, Artificial Sequence
  Synthetic
gcacaccacugaagagauu

SEQ ID NO: 3408 - RNA, 19 nt, Artificial Sequence
  Synthetic
uguccugaguggagagaau

SEQ ID NO: 3409 - RNA, 19 nt, Artificial Sequence
  Synthetic
gugcuaaaugcaagaagaa

SEQ ID NO: 3410 - RNA, 19 nt, Artificial Sequence
  Synthetic
aagagagagaagaggagaa

SEQ ID NO: 3411 - RNA, 19 nt, Artificial Sequence
  Synthetic
gggaaggaaaagaaaauua

SEQ ID NO: 3412 - RNA, 19 nt, Artificial Sequence
  Synthetic
agagagaagaggagaaacu

SEQ ID NO: 3413 - RNA, 19 nt, Artificial Sequence
  Synthetic
ccaagaagaacaucggcaa

SEQ ID NO: 3414 - RNA, 19 nt, Artificial Sequence
  Synthetic
ggaaaggagcagaaggucu

SEQ ID NO: 3415 - RNA, 19 nt, Artificial Sequence
  Synthetic
ggacagugguaccagauga

SEQ ID NO: 3416 - RNA, 19 nt, Artificial Sequence
  Synthetic
caccaaggauguaggcuau

SEQ ID NO: 3417 - RNA, 19 nt, Artificial Sequence
  Synthetic
gaaaggagcagaaggucuu

SEQ ID NO: 3418 - RNA, 19 nt, Artificial Sequence
  Synthetic
agcagaaggucuuggugaa

SEQ ID NO: 3419 - RNA, 19 nt, Artificial Sequence
  Synthetic
ucaccaaggauguaggcua

SEQ ID NO: 3420 - RNA, 19 nt, Artificial Sequence
  Synthetic
agagagagaagaggagaaa

SEQ ID NO: 3421 - RNA, 19 nt, Artificial Sequence
  Synthetic
agaggaagaggaagaagaa

SEQ ID NO: 3422 - RNA, 19 nt, Artificial Sequence
  Synthetic
gaggaggaaaggagcagaa

SEQ ID NO: 3423 - RNA, 19 nt, Artificial Sequence
  Synthetic
cgacaagacucugggacga

SEQ ID NO: 3424 - RNA, 19 nt, Artificial Sequence
  Synthetic
cucaaauacucaucugaua

SEQ ID NO: 3425 - RNA, 19 nt, Artificial Sequence
  Synthetic
cuacaauacuggaggaauu

SEQ ID NO: 3426 - RNA, 19 nt, Artificial Sequence
  Synthetic
gaagauuacccuaaggaaa

SEQ ID NO: 3427 - RNA, 19 nt, Artificial Sequence
  Synthetic
caaaagagcuaccgaguua

SEQ ID NO: 3428 - RNA, 19 nt, Artificial Sequence
  Synthetic
gaaaagaaaugcugagaca

SEQ ID NO: 3429 - RNA, 19 nt, Artificial Sequence
  Synthetic
gcucagaauugaaugaaga

SEQ ID NO: 3430 - RNA, 19 nt, Artificial Sequence
  Synthetic
aaguaaggaugcagaggaa

SEQ ID NO: 3431 - RNA, 19 nt, Artificial Sequence
  Synthetic
gcgugaaagggaagagcaa

SEQ ID NO: 3432 - RNA, 19 nt, Artificial Sequence
  Synthetic
gugaaagggaagagcaaga

SEQ ID NO: 3433 - RNA, 19 nt, Artificial Sequence
  Synthetic
guaaggaugcagaggaaau

SEQ ID NO: 3434 - RNA, 19 nt, Artificial Sequence
  Synthetic
ggaaauaccugcuauauga

SEQ ID NO: 3435 - RNA, 19 nt, Artificial Sequence
  Synthetic
ccgaagaacuggaguauuc

SEQ ID NO: 3436 - RNA, 19 nt, Artificial Sequence
  Synthetic
gaaaagaggaaaagaauga

SEQ ID NO: 3437 - RNA, 19 nt, Artificial Sequence
  Synthetic
gagaaaagcagcugaguuu

SEQ ID NO: 3438 - RNA, 19 nt, Artificial Sequence
  Synthetic
cugaaagaagauauggaaa

SEQ ID NO: 3439 - RNA, 19 nt, Artificial Sequence
  Synthetic
gauuaagacuguagcagga

SEQ ID NO: 3440 - RNA, 19 nt, Artificial Sequence
  Synthetic
ucgaaaaguucuugguaau

SEQ ID NO: 3441 - RNA, 19 nt, Artificial Sequence
  Synthetic
cagcuaagucauaacauua

SEQ ID NO: 3442 - RNA, 19 nt, Artificial Sequence
  Synthetic
gaagaaaauucaccagaua

SEQ ID NO: 3443 - RNA, 19 nt, Artificial Sequence
  Synthetic
acucaggauuugacagaau

SEQ ID NO: 3444 - RNA, 19 nt, Artificial Sequence
  Synthetic
agaucaggguugcuagaaa

SEQ ID NO: 3445 - RNA, 19 nt, Artificial Sequence
  Synthetic
gaaacagucagaagagaau

SEQ ID NO: 3446 - RNA, 19 nt, Artificial Sequence
  Synthetic
gggccgaagaacuggagua

SEQ ID NO: 3447 - RNA, 19 nt, Artificial Sequence
  Synthetic
ugacagaaugagcgaagaa

SEQ ID NO: 3448 - RNA, 19 nt, Artificial Sequence
  Synthetic
agccagagacuuugugaaa

SEQ ID NO: 3449 - RNA, 19 nt, Artificial Sequence
  Synthetic
gagauaaguaagagagaug

SEQ ID NO: 3450 - RNA, 19 nt, Artificial Sequence
  Synthetic
gggaacagaaagaagauga

SEQ ID NO: 3451 - RNA, 19 nt, Artificial Sequence
  Synthetic
cugaggaacugaaaagaaa

SEQ ID NO: 3452 - RNA, 19 nt, Artificial Sequence
  Synthetic
ggaggaauuccaaggauau

SEQ ID NO: 3453 - RNA, 19 nt, Artificial Sequence
  Synthetic
uguagcaggaaguggaaua

SEQ ID NO: 3454 - RNA, 19 nt, Artificial Sequence
  Synthetic
gaauaggacaucagggcuu

SEQ ID NO: 3455 - RNA, 19 nt, Artificial Sequence
  Synthetic
gcauaguacuaaugguuua

SEQ ID NO: 3456 - RNA, 19 nt, Artificial Sequence
  Synthetic
cagaagaaccaguaguuua

SEQ ID NO: 3457 - RNA, 19 nt, Artificial Sequence
  Synthetic
acacaagccuucugaaauu

SEQ ID NO: 3458 - RNA, 19 nt, Artificial Sequence
  Synthetic
ggaaguagcuaguaaagca

SEQ ID NO: 3459 - RNA, 19 nt, Artificial Sequence
  Synthetic
gaaagagagcugcgggaau

SEQ ID NO: 3460 - RNA, 19 nt, Artificial Sequence
  Synthetic
cagcaagacuguucugaau

SEQ ID NO: 3461 - RNA, 19 nt, Artificial Sequence
  Synthetic
acuaaugguuuaaguggua

SEQ ID NO: 3462 - RNA, 19 nt, Artificial Sequence
  Synthetic
ucagaaaccaggaggugaa

SEQ ID NO: 3463 - RNA, 19 nt, Artificial Sequence
  Synthetic
gguaauugcacuccugaaa

SEQ ID NO: 3464 - RNA, 19 nt, Artificial Sequence
  Synthetic
guaacuugcugcagaacau

SEQ ID NO: 3465 - RNA, 19 nt, Artificial Sequence
  Synthetic
gaguuuuacuguucugaaa

SEQ ID NO: 3466 - RNA, 19 nt, Artificial Sequence
  Synthetic
cuggauaaauggagaccca

SEQ ID NO: 3467 - RNA, 19 nt, Artificial Sequence
  Synthetic
guaucaugugagaaggaaa

SEQ ID NO: 3468 - RNA, 19 nt, Artificial Sequence
  Synthetic
uuuaaugacaguagaguga

SEQ ID NO: 3469 - RNA, 19 nt, Artificial Sequence
  Synthetic
agguagagguguuacggau

SEQ ID NO: 3470 - RNA, 19 nt, Artificial Sequence
  Synthetic
ugaauaacauaaaggccaa

SEQ ID NO: 3471 - RNA, 19 nt, Artificial Sequence
  Synthetic
gagaauacuugucugaaga

SEQ ID NO: 3472 - RNA, 19 nt, Artificial Sequence
  Synthetic
ccaugaggaucuucacuaa

SEQ ID NO: 3473 - RNA, 19 nt, Artificial Sequence
  Synthetic
gcaucacugagaaggaaua

SEQ ID NO: 3474 - RNA, 19 nt, Artificial Sequence
  Synthetic
acgaguaccaggagacaau

SEQ ID NO: 3475 - RNA, 19 nt, Artificial Sequence
  Synthetic
caaauguggaucugagaga

SEQ ID NO: 3476 - RNA, 19 nt, Artificial Sequence
  Synthetic
ucacugagaaggaauauaa

SEQ ID NO: 3477 - RNA, 19 nt, Artificial Sequence
  Synthetic
agacuuacaaggagaacuu

SEQ ID NO: 3478 - RNA, 19 nt, Artificial Sequence
  Synthetic
cugaauaacauaaaggcca

SEQ ID NO: 3479 - RNA, 19 nt, Artificial Sequence
  Synthetic
ggguauugugggacugaau

SEQ ID NO: 3480 - RNA, 19 nt, Artificial Sequence
  Synthetic
uggcuaaguucaauggcau

SEQ ID NO: 3481 - RNA, 19 nt, Artificial Sequence
  Synthetic
ucuucaacauccuggcuaa

SEQ ID NO: 3482 - RNA, 19 nt, Artificial Sequence
  Synthetic
ccaaauggaugaagguuua

SEQ ID NO: 3483 - RNA, 19 nt, Artificial Sequence
  Synthetic
agaacaaacugaaugguaa

SEQ ID NO: 3484 - RNA, 19 nt, Artificial Sequence
  Synthetic
gaacaaacugaaugguaaa

SEQ ID NO: 3485 - RNA, 19 nt, Artificial Sequence
  Synthetic
ggaacaaauacaugagcaa

SEQ ID NO: 3486 - RNA, 19 nt, Artificial Sequence
  Synthetic
aggaagaaauggagcauca

SEQ ID NO: 3487 - RNA, 19 nt, Artificial Sequence
  Synthetic
ggaagaaguaugugggcuu

SEQ ID NO: 3488 - RNA, 19 nt, Artificial Sequence
  Synthetic
gagaagaugaggaagaaau

SEQ ID NO: 3489 - RNA, 19 nt, Artificial Sequence
  Synthetic
cugcauaugcgaagaacaa

SEQ ID NO: 3490 - RNA, 19 nt, Artificial Sequence
  Synthetic
ccucagaagaagaagaaga

SEQ ID NO: 3491 - RNA, 19 nt, Artificial Sequence
  Synthetic
aacagauacuggagggaua

SEQ ID NO: 3492 - RNA, 19 nt, Artificial Sequence
  Synthetic
gcaaauggugauagcacua

SEQ ID NO: 3493 - RNA, 19 nt, Artificial Sequence
  Synthetic
gggaagaugagccaggaaa

SEQ ID NO: 3494 - RNA, 19 nt, Artificial Sequence
  Synthetic
ccuacgagcaguugagcaa

SEQ ID NO: 3495 - RNA, 19 nt, Artificial Sequence
  Synthetic
gaacagcugugaaggagaa

SEQ ID NO: 3496 - RNA, 19 nt, Artificial Sequence
  Synthetic
ggaaauugcagaagccuau

SEQ ID NO: 3497 - RNA, 19 nt, Artificial Sequence
  Synthetic
ggaagaugagccaggaaau

SEQ ID NO: 3498 - RNA, 19 nt, Artificial Sequence
  Synthetic
aaggagaagaugaggaaga

SEQ ID NO: 3499 - RNA, 19 nt, Artificial Sequence
  Synthetic
gggauaagcucgacacagu

SEQ ID NO: 3500 - RNA, 19 nt, Artificial Sequence
  Synthetic
gcaucaggaagaaggcaaa

SEQ ID NO: 3501 - RNA, 19 nt, Artificial Sequence
  Synthetic
gggaaauugcagaagccua

SEQ ID NO: 3502 - RNA, 19 nt, Artificial Sequence
  Synthetic
acgagaagcaugugagcau

SEQ ID NO: 3503 - RNA, 19 nt, Artificial Sequence
  Synthetic
cagaugcggugguggcaaa

SEQ ID NO: 3504 - RNA, 19 nt, Artificial Sequence
  Synthetic
gagaggaaguccaggccau

SEQ ID NO: 3505 - RNA, 19 nt, Artificial Sequence
  Synthetic
gcaaagucgagguguauuu

SEQ ID NO: 3506 - RNA, 19 nt, Artificial Sequence
  Synthetic
gaagaaagaucgaguuaug

SEQ ID NO: 3507 - RNA, 19 nt, Artificial Sequence
  Synthetic
acugcaaagucgaggugua

SEQ ID NO: 3508 - RNA, 19 nt, Artificial Sequence
  Synthetic
gcaaaggaagccugggaga

SEQ ID NO: 3509 - RNA, 19 nt, Artificial Sequence
  Synthetic
gaacugaagcucugugaga

SEQ ID NO: 3510 - RNA, 19 nt, Artificial Sequence
  Synthetic
ugaaggagaagaugaggaa

SEQ ID NO: 3511 - RNA, 19 nt, Artificial Sequence
  Synthetic
cagaagaagaagaagacca

SEQ ID NO: 3512 - RNA, 19 nt, Artificial Sequence
  Synthetic
gggaagaaauuaaagacua

SEQ ID NO: 3513 - RNA, 19 nt, Artificial Sequence
  Synthetic
gcuuuuaauugaaggacaa

SEQ ID NO: 3514 - RNA, 19 nt, Artificial Sequence
  Synthetic
caaauaaccaagaggaaaa

SEQ ID NO: 3515 - RNA, 19 nt, Artificial Sequence
  Synthetic
ggaaaagggaagaaauuaa

SEQ ID NO: 3516 - RNA, 19 nt, Artificial Sequence
  Synthetic
aaacaauaucugugagaga

SEQ ID NO: 3517 - RNA, 19 nt, Artificial Sequence
  Synthetic
aggauaaacccgaugcaaa

SEQ ID NO: 3518 - RNA, 19 nt, Artificial Sequence
  Synthetic
ccaaggaagacaugaggaa

SEQ ID NO: 3519 - RNA, 19 nt, Artificial Sequence
  Synthetic
caaucuuauuagaggagaa

SEQ ID NO: 3520 - RNA, 19 nt, Artificial Sequence
  Synthetic
gcucagaaauggaagcuca

SEQ ID NO: 3521 - RNA, 19 nt, Artificial Sequence
  Synthetic
aguuagaaucugaagagaa

SEQ ID NO: 3522 - RNA, 19 nt, Artificial Sequence
  Synthetic
acaaauaaccaagaggaaa

SEQ ID NO: 3523 - RNA, 19 nt, Artificial Sequence
  Synthetic
ggaccaguaaugaggaaau

SEQ ID NO: 3524 - RNA, 19 nt, Artificial Sequence
  Synthetic
cugaagagaagcaaguuaa

SEQ ID NO: 3525 - RNA, 19 nt, Artificial Sequence
  Synthetic
ccagagugaagaagagauu

SEQ ID NO: 3526 - RNA, 19 nt, Artificial Sequence
  Synthetic
aaggaagacaugaggaaga

SEQ ID NO: 3527 - RNA, 19 nt, Artificial Sequence
  Synthetic
ugaaauugcugauggggaa

SEQ ID NO: 3528 - RNA, 19 nt, Artificial Sequence
  Synthetic
uguaagaacguuagcgaga

SEQ ID NO: 3529 - RNA, 19 nt, Artificial Sequence
  Synthetic
uggaaaucguaguagaaga

SEQ ID NO: 3530 - RNA, 19 nt, Artificial Sequence
  Synthetic
cuaugaagcuggagagccu

SEQ ID NO: 3531 - RNA, 19 nt, Artificial Sequence
  Synthetic
gggacugugucuuggaaaa

SEQ ID NO: 3532 - RNA, 19 nt, Artificial Sequence
  Synthetic
aaguaaaccagaugugaau

SEQ ID NO: 3533 - RNA, 19 nt, Artificial Sequence
  Synthetic
ccuggacgguggagaggaa

SEQ ID NO: 3534 - RNA, 19 nt, Artificial Sequence
  Synthetic
ggauuaaucucaagcccuu

SEQ ID NO: 3535 - RNA, 19 nt, Artificial Sequence
  Synthetic
cugauauguucuggagaua

SEQ ID NO: 3536 - RNA, 19 nt, Artificial Sequence
  Synthetic
gcagaauugaagaugggaa

SEQ ID NO: 3537 - RNA, 19 nt, Artificial Sequence
  Synthetic
aguuaaugcugaagaaauc

SEQ ID NO: 3538 - RNA, 19 nt, Artificial Sequence
  Synthetic
aaucaucccuuuacaguua

SEQ ID NO: 3539 - RNA, 19 nt, Artificial Sequence
  Synthetic
gggaaaaggauauugaaca

SEQ ID NO: 3540 - RNA, 19 nt, Artificial Sequence
  Synthetic
auguugaucauuugggaaa

SEQ ID NO: 3541 - RNA, 19 nt, Artificial Sequence
  Synthetic
cggagauacuauugguguu

SEQ ID NO: 3542 - RNA, 19 nt, Artificial Sequence
  Synthetic
cggaacagcuugauggaga

SEQ ID NO: 3543 - RNA, 19 nt, Artificial Sequence
  Synthetic
gggcaaggagaaugggauu

SEQ ID NO: 3544 - RNA, 19 nt, Artificial Sequence
  Synthetic
cuagaagagccuaaagcaa

SEQ ID NO: 3545 - RNA, 19 nt, Artificial Sequence
  Synthetic
ucugaaacguuuugcaaau

SEQ ID NO: 3546 - RNA, 19 nt, Artificial Sequence
  Synthetic
ggagcaagacugagggcca

SEQ ID NO: 3547 - RNA, 19 nt, Artificial Sequence
  Synthetic
cagcaauaaauuagacaga

SEQ ID NO: 3548 - RNA, 19 nt, Artificial Sequence
  Synthetic
cauaguaauucuuuggaga

SEQ ID NO: 3549 - RNA, 19 nt, Artificial Sequence
  Synthetic
caagaaaaucagaggacuu

SEQ ID NO: 3550 - RNA, 19 nt, Artificial Sequence
  Synthetic
agucaaaggggcugggcaa

SEQ ID NO: 3551 - RNA, 19 nt, Artificial Sequence
  Synthetic
cugaaaggcucgacggaug

SEQ ID NO: 3552 - RNA, 19 nt, Artificial Sequence
  Synthetic
gcuucaaagagguucacua

SEQ ID NO: 3553 - RNA, 19 nt, Artificial Sequence
  Synthetic
cagucauguugaaaagaaa

SEQ ID NO: 3554 - RNA, 19 nt, Artificial Sequence
  Synthetic
cuugaauggcagcaauaaa

SEQ ID NO: 3555 - RNA, 19 nt, Artificial Sequence
  Synthetic
gcucccagcccgugaugaa

SEQ ID NO: 3556 - RNA, 19 nt, Artificial Sequence
  Synthetic
cagugauauuagaucggua

SEQ ID NO: 3557 - RNA, 19 nt, Artificial Sequence
  Synthetic
ccaaagacaaacaccgaga

SEQ ID NO: 3558 - RNA, 19 nt, Artificial Sequence
  Synthetic
gugcagacagcgacaguga

SEQ ID NO: 3559 - RNA, 19 nt, Artificial Sequence
  Synthetic
acaaaaggaucaagcccua

SEQ ID NO: 3560 - RNA, 19 nt, Artificial Sequence
  Synthetic
cuccagaauuugggcaaua

SEQ ID NO: 3561 - RNA, 19 nt, Artificial Sequence
  Synthetic
gcaacaaacugaaaggcuc

SEQ ID NO: 3562 - RNA, 19 nt, Artificial Sequence
  Synthetic
ccuggaacguacagcucua

SEQ ID NO: 3563 - RNA, 19 nt, Artificial Sequence
  Synthetic
gcuuagcaacaaacugaaa

SEQ ID NO: 3564 - RNA, 19 nt, Artificial Sequence
  Synthetic
ucaacaaggcauuggagca

SEQ ID NO: 3565 - RNA, 19 nt, Artificial Sequence
  Synthetic
cuucaggcuuagcaacaaa

SEQ ID NO: 3566 - RNA, 19 nt, Artificial Sequence
  Synthetic
ggccauuacuucugcuaca

SEQ ID NO: 3567 - RNA, 19 nt, Artificial Sequence
  Synthetic
aaacacuuacggauggaaa

SEQ ID NO: 3568 - RNA, 19 nt, Artificial Sequence
  Synthetic
cuaaagcaaagaagcacaa

SEQ ID NO: 3569 - RNA, 19 nt, Artificial Sequence
  Synthetic
ggaaagucccggaaacgga

SEQ ID NO: 3570 - RNA, 19 nt, Artificial Sequence
  Synthetic
cacucuuguuugucagaua

SEQ ID NO: 3571 - RNA, 19 nt, Artificial Sequence
  Synthetic
cagucuaccucgaacgcau

SEQ ID NO: 3572 - RNA, 19 nt, Artificial Sequence
  Synthetic
gccaugaacuggaaggaga

SEQ ID NO: 3573 - RNA, 19 nt, Artificial Sequence
  Synthetic
gcuugaagaaccacggcaa

SEQ ID NO: 3574 - RNA, 19 nt, Artificial Sequence
  Synthetic
gcucucaguuccaaggcaa

SEQ ID NO: 3575 - RNA, 19 nt, Artificial Sequence
  Synthetic
agacgagguucuugagugu

SEQ ID NO: 3576 - RNA, 19 nt, Artificial Sequence
  Synthetic
gcgcucagggcuugaagaa

SEQ ID NO: 3577 - RNA, 19 nt, Artificial Sequence
  Synthetic
ggaagaugguugcagagga

SEQ ID NO: 3578 - RNA, 19 nt, Artificial Sequence
  Synthetic
cggaagaaggagaacagga

SEQ ID NO: 3579 - RNA, 19 nt, Artificial Sequence
  Synthetic
gagauaauguguaugccuu

SEQ ID NO: 3580 - RNA, 19 nt, Artificial Sequence
  Synthetic
gugcagugucucagcaaca

SEQ ID NO: 3581 - RNA, 19 nt, Artificial Sequence
  Synthetic
cagcaaagacagucgccga

SEQ ID NO: 3582 - RNA, 19 nt, Artificial Sequence
  Synthetic
auaccaucgcagagggaga

SEQ ID NO: 3583 - RNA, 19 nt, Artificial Sequence
  Synthetic
ugaacuggaaggagagcuu

SEQ ID NO: 3584 - RNA, 19 nt, Artificial Sequence
  Synthetic
gaggaugagaagucagcau

SEQ ID NO: 3585 - RNA, 19 nt, Artificial Sequence
  Synthetic
caggugggcgagagaagaa

SEQ ID NO: 3586 - RNA, 19 nt, Artificial Sequence
  Synthetic
guaacaggauugagaaauu

SEQ ID NO: 3587 - RNA, 19 nt, Artificial Sequence
  Synthetic
aagcagaauuggaaaguau

SEQ ID NO: 3588 - RNA, 19 nt, Artificial Sequence
  Synthetic
gauugagaaauuugggaaa

SEQ ID NO: 3589 - RNA, 19 nt, Artificial Sequence
  Synthetic
guaucaaguuaaagcagaa

SEQ ID NO: 3590 - RNA, 19 nt, Artificial Sequence
  Synthetic
guguaacaggauugagaaa

SEQ ID NO: 3591 - RNA, 19 nt, Artificial Sequence
  Synthetic
ggaaauacuugcuauauga

SEQ ID NO: 3592 - RNA, 19 nt, Artificial Sequence
  Synthetic
aaacuaagcaugugcacua

SEQ ID NO: 3593 - RNA, 19 nt, Artificial Sequence
  Synthetic
acuaagugguggagcauca

SEQ ID NO: 3594 - RNA, 19 nt, Artificial Sequence
  Synthetic
ucuuaaacauggagcccua

SEQ ID NO: 3595 - RNA, 19 nt, Artificial Sequence
  Synthetic
augaaugaaugucaggaaa

SEQ ID NO: 3596 - RNA, 19 nt, Artificial Sequence
  Synthetic
cugaagcuuuagaaggaaa

SEQ ID NO: 3597 - RNA, 19 nt, Artificial Sequence
  Synthetic
gguaaaaucuuucgaacau

SEQ ID NO: 3598 - RNA, 19 nt, Artificial Sequence
  Synthetic
gaauuggaguaucaaguua

SEQ ID NO: 3599 - RNA, 19 nt, Artificial Sequence
  Synthetic
cugaaauguuggccaaauu

SEQ ID NO: 3600 - RNA, 19 nt, Artificial Sequence
  Synthetic
gcucuuuggcacaggagaa

SEQ ID NO: 3601 - RNA, 19 nt, Artificial Sequence
  Synthetic
ccauguugccuguggaaga

SEQ ID NO: 3602 - RNA, 19 nt, Artificial Sequence
  Synthetic
ggacguaauaaccgagaga

SEQ ID NO: 3603 - RNA, 19 nt, Artificial Sequence
  Synthetic
cagaaaaggaugaggguaa

SEQ ID NO: 3604 - RNA, 19 nt, Artificial Sequence
  Synthetic
cagcaaaagaagaaggaaa

SEQ ID NO: 3605 - RNA, 19 nt, Artificial Sequence
  Synthetic
ugaugacauuguagagaaa

SEQ ID NO: 3606 - RNA, 19 nt, Artificial Sequence
  Synthetic
ccaaagaaguucauuucaa

SEQ ID NO: 3607 - RNA, 19 nt, Artificial Sequence
  Synthetic
cuaucagucaagagaguaa

SEQ ID NO: 3608 - RNA, 19 nt, Artificial Sequence
  Synthetic
gaggagaagaaacaggaaa

SEQ ID NO: 3609 - RNA, 19 nt, Artificial Sequence
  Synthetic
agcaaaagaagaaggaaaa

SEQ ID NO: 3610 - RNA, 19 nt, Artificial Sequence
  Synthetic
ggucaauuuuggaaacaca

SEQ ID NO: 3611 - RNA, 19 nt, Artificial Sequence
  Synthetic
aggagaagaaacaggaaaa

SEQ ID NO: 3612 - RNA, 19 nt, Artificial Sequence
  Synthetic
cuaagagacuucagcaaca

SEQ ID NO: 3613 - RNA, 19 nt, Artificial Sequence
  Synthetic
cauacaaggcccagcaaaa

SEQ ID NO: 3614 - RNA, 19 nt, Artificial Sequence
  Synthetic
gaacagaaauggaagcaaa

SEQ ID NO: 3615 - RNA, 19 nt, Artificial Sequence
  Synthetic
gaaagcaaaugaagggaaa

SEQ ID NO: 3616 - RNA, 19 nt, Artificial Sequence
  Synthetic
ccugaaagcugaaggauuu

SEQ ID NO: 3617 - RNA, 19 nt, Artificial Sequence
  Synthetic
gcgcaauacaugcaagaua

SEQ ID NO: 3618 - RNA, 19 nt, Artificial Sequence
  Synthetic
gcuuauaagaugauggauu

SEQ ID NO: 3619 - RNA, 19 nt, Artificial Sequence
  Synthetic
aggaaugacuguacggcaa

SEQ ID NO: 3620 - RNA, 19 nt, Artificial Sequence
  Synthetic
cagcaaaaguacugagaca

SEQ ID NO: 3621 - RNA, 19 nt, Artificial Sequence
  Synthetic
gaaaagagacaacgagaaa

SEQ ID NO: 3622 - RNA, 19 nt, Artificial Sequence
  Synthetic
ggauauuauucuagugcuu

SEQ ID NO: 3623 - RNA, 19 nt, Artificial Sequence
  Synthetic
gcuccgagacuuuggauua

SEQ ID NO: 3624 - RNA, 19 nt, Artificial Sequence
  Synthetic
cgcaauacaugcaagauaa

SEQ ID NO: 3625 - RNA, 19 nt, Artificial Sequence
  Synthetic
ugacagaugagcaaagaaa

SEQ ID NO: 3626 - RNA, 19 nt, Artificial Sequence
  Synthetic
gugaauaaugacaggagua

SEQ ID NO: 3627 - RNA, 19 nt, Artificial Sequence
  Synthetic
ggauaacacaagaggacau

SEQ ID NO: 3628 - RNA, 19 nt, Artificial Sequence
  Synthetic
agagagaguuggaagaaca

SEQ ID NO: 3629 - RNA, 19 nt, Artificial Sequence
  Synthetic
gcauuauauaagugggaau

SEQ ID NO: 3630 - RNA, 19 nt, Artificial Sequence
  Synthetic
ggaugaugacugugaaaga

SEQ ID NO: 3631 - RNA, 19 nt, Artificial Sequence
  Synthetic
aaggcaagcugaaggacua

SEQ ID NO: 3632 - RNA, 19 nt, Artificial Sequence
  Synthetic
aaaggagaauacagaguua

SEQ ID NO: 3633 - RNA, 19 nt, Artificial Sequence
  Synthetic
aguagaagaacgaaagcaa

SEQ ID NO: 3634 - RNA, 19 nt, Artificial Sequence
  Synthetic
guauaaagucauucaguga

SEQ ID NO: 3635 - RNA, 19 nt, Artificial Sequence
  Synthetic
gggcaagaguguucagcaa

SEQ ID NO: 3636 - RNA, 19 nt, Artificial Sequence
  Synthetic
gagaauggcccuugccuua

SEQ ID NO: 3637 - RNA, 19 nt, Artificial Sequence
  Synthetic
gggcagagaagcaaggaac

SEQ ID NO: 3638 - RNA, 19 nt, Artificial Sequence
  Synthetic
guguggacugugagacuua

SEQ ID NO: 3639 - RNA, 19 nt, Artificial Sequence
  Synthetic
ucgaguuccuacagaguuu

SEQ ID NO: 3640 - RNA, 19 nt, Artificial Sequence
  Synthetic
ggcaagaguguucagcaaa

SEQ ID NO: 3641 - RNA, 19 nt, Artificial Sequence
  Synthetic
ccacagagaaggugaagua

SEQ ID NO: 3642 - RNA, 19 nt, Artificial Sequence
  Synthetic
uggauaagcuggagaagau

SEQ ID NO: 3643 - RNA, 19 nt, Artificial Sequence
  Synthetic
ucaacaugguggagaggaa

SEQ ID NO: 3644 - RNA, 19 nt, Artificial Sequence
  Synthetic
agaggaaguauguggauaa

SEQ ID NO: 3645 - RNA, 19 nt, Artificial Sequence
  Synthetic
ugacugaguuggagauaga

SEQ ID NO: 3646 - RNA, 19 nt, Artificial Sequence
  Synthetic
aagaggagcuucuggagua

SEQ ID NO: 3647 - RNA, 19 nt, Artificial Sequence
  Synthetic
gagcagaggggcagcgaua

SEQ ID NO: 3648 - RNA, 19 nt, Artificial Sequence
  Synthetic
ggaugguccuggaaaguau

SEQ ID NO: 3649 - RNA, 19 nt, Artificial Sequence
  Synthetic
uggaguacgaggagaagaa

SEQ ID NO: 3650 - RNA, 19 nt, Artificial Sequence
  Synthetic
cgaggagaaguuugaauua

SEQ ID NO: 3651 - RNA, 19 nt, Artificial Sequence
  Synthetic
ggaugcagcccuuaacaaa

SEQ ID NO: 3652 - RNA, 19 nt, Artificial Sequence
  Synthetic
agagagaaccuguggcuca

SEQ ID NO: 3653 - RNA, 19 nt, Artificial Sequence
  Synthetic
aggagaaguuugaauuaga

SEQ ID NO: 3654 - RNA, 19 nt, Artificial Sequence
  Synthetic
gagcugacguguacucaua

SEQ ID NO: 3655 - RNA, 19 nt, Artificial Sequence
  Synthetic
cagaggaaguauguggaua

SEQ ID NO: 3656 - RNA, 19 nt, Artificial Sequence
  Synthetic
gccucaagcaguuggacaa

SEQ ID NO: 3657 - RNA, 19 nt, Artificial Sequence
  Synthetic
guggagagacauuucaaua

SEQ ID NO: 3658 - RNA, 19 nt, Artificial Sequence
  Synthetic
caucaagaaagaaggcaga

SEQ ID NO: 3659 - RNA, 19 nt, Artificial Sequence
  Synthetic
aaagaaggcagauggguga

SEQ ID NO: 3660 - RNA, 19 nt, Artificial Sequence
  Synthetic
gcgaggagaaguuugaauu

SEQ ID NO: 3661 - RNA, 19 nt, Artificial Sequence
  Synthetic
uggagagacauuucaauaa

SEQ ID NO: 3662 - RNA, 19 nt, Artificial Sequence
  Synthetic
aacaguauguggagagaca

SEQ ID NO: 3663 - RNA, 19 nt, Artificial Sequence
  Synthetic
caaaauacacgaugugaau

SEQ ID NO: 3664 - RNA, 19 nt, Artificial Sequence
  Synthetic
cagacaagacgaugacuga

SEQ ID NO: 3665 - RNA, 19 nt, Artificial Sequence
  Synthetic
aagugugacaugagagaga

SEQ ID NO: 3666 - RNA, 19 nt, Artificial Sequence
  Synthetic
aguuggagauagacaugaa

SEQ ID NO: 3667 - RNA, 19 nt, Artificial Sequence
  Synthetic
aagccgaagaggagaagau

SEQ ID NO: 3668 - RNA, 19 nt, Artificial Sequence
  Synthetic
gaucuacaaugaccagaaa

SEQ ID NO: 3669 - RNA, 19 nt, Artificial Sequence
  Synthetic
ccaagugugacaugagaga

SEQ ID NO: 3670 - RNA, 19 nt, Artificial Sequence
  Synthetic
gcuucuugguggaggaaag

SEQ ID NO: 3671 - RNA, 19 nt, Artificial Sequence
  Synthetic
gcagaaagauggacuggaa

SEQ ID NO: 3672 - RNA, 19 nt, Artificial Sequence
  Synthetic
gggaaaucuccaagaacaa

SEQ ID NO: 3673 - RNA, 19 nt, Artificial Sequence
  Synthetic
gagucaaguuuguggguca

SEQ ID NO: 3674 - RNA, 19 nt, Artificial Sequence
  Synthetic
uggaaauaccacaggcuua

SEQ ID NO: 3675 - RNA, 19 nt, Artificial Sequence
  Synthetic
ccauugaggaguugaagaa

SEQ ID NO: 3676 - RNA, 19 nt, Artificial Sequence
  Synthetic
agaacaaccucaaguauau

SEQ ID NO: 3677 - RNA, 19 nt, Artificial Sequence
  Synthetic
uggaugagaaugaggauau

SEQ ID NO: 3678 - RNA, 19 nt, Artificial Sequence
  Synthetic
gcacggaagcagcggaaaa

SEQ ID NO: 3679 - RNA, 19 nt, Artificial Sequence
  Synthetic
ccaugaagaaggugggcuu

SEQ ID NO: 3680 - RNA, 19 nt, Artificial Sequence
  Synthetic
ccuucaagauggcaguaaa

SEQ ID NO: 3681 - RNA, 19 nt, Artificial Sequence
  Synthetic
gcacugagccugagucuuu

SEQ ID NO: 3682 - RNA, 19 nt, Artificial Sequence
  Synthetic
caucaaaguuggagagacc

SEQ ID NO: 3683 - RNA, 19 nt, Artificial Sequence
  Synthetic
guguaugaccugauggcua

SEQ ID NO: 3684 - RNA, 19 nt, Artificial Sequence
  Synthetic
gggucuggaugcugaguuu

SEQ ID NO: 3685 - RNA, 19 nt, Artificial Sequence
  Synthetic
gggaaacccaugacaguau

SEQ ID NO: 3686 - RNA, 19 nt, Artificial Sequence
  Synthetic
ccuaagaacuguuggguua

SEQ ID NO: 3687 - RNA, 19 nt, Artificial Sequence
  Synthetic
gcaaugagguugaaagaau

SEQ ID NO: 3688 - RNA, 19 nt, Artificial Sequence
  Synthetic
ggaagagagugaacaguaa

SEQ ID NO: 3689 - RNA, 19 nt, Artificial Sequence
  Synthetic
cagcauaguccaagacaua

SEQ ID NO: 3690 - RNA, 19 nt, Artificial Sequence
  Synthetic
caggcaaagcagagagaaa

SEQ ID NO: 3691 - RNA, 19 nt, Artificial Sequence
  Synthetic
gauuggaacuagauggaaa

SEQ ID NO: 3692 - RNA, 19 nt, Artificial Sequence
  Synthetic
cgacgaagcuugcggguuu

SEQ ID NO: 3693 - RNA, 19 nt, Artificial Sequence
  Synthetic
ggauaucagugguguuaaa

SEQ ID NO: 3694 - RNA, 19 nt, Artificial Sequence
  Synthetic
uggaaaaggagcagagaaa

SEQ ID NO: 3695 - RNA, 19 nt, Artificial Sequence
  Synthetic
agccaagauucuagggaua

SEQ ID NO: 3696 - RNA, 19 nt, Artificial Sequence
  Synthetic
gauaauuggcagaugcaaa

SEQ ID NO: 3697 - RNA, 19 nt, Artificial Sequence
  Synthetic
acagaugacuauaggaaau

SEQ ID NO: 3698 - RNA, 19 nt, Artificial Sequence
  Synthetic
ccauaaugcaagagaacau

SEQ ID NO: 3699 - RNA, 19 nt, Artificial Sequence
  Synthetic
guugaaagaauguuggaaa

SEQ ID NO: 3700 - RNA, 19 nt, Artificial Sequence
  Synthetic
guuaaaugaaccaggacaa

SEQ ID NO: 3701 - RNA, 19 nt, Artificial Sequence
  Synthetic
uggaaaccuaugagagaaa

SEQ ID NO: 3702 - RNA, 19 nt, Artificial Sequence
  Synthetic
uuacagaauuugugcggua

SEQ ID NO: 3703 - RNA, 19 nt, Artificial Sequence
  Synthetic
ggaaagauguugucuccaa

SEQ ID NO: 3704 - RNA, 19 nt, Artificial Sequence
  Synthetic
gggaagagagugaacagua

SEQ ID NO: 3705 - RNA, 19 nt, Artificial Sequence
  Synthetic
acggaaaccugguggcaau

SEQ ID NO: 3706 - RNA, 19 nt, Artificial Sequence
  Synthetic
gaugaaaugaagcaggaaa

SEQ ID NO: 3707 - RNA, 19 nt, Artificial Sequence
  Synthetic
cgacaagcaaccuaaauaa

SEQ ID NO: 3708 - RNA, 19 nt, Artificial Sequence
  Synthetic
gggacaaagaaaagauuua

SEQ ID NO: 3709 - RNA, 19 nt, Artificial Sequence
  Synthetic
ugaagacaauggaaaguua

SEQ ID NO: 3710 - RNA, 19 nt, Artificial Sequence
  Synthetic
gaucaaagggaaaagauaa

SEQ ID NO: 3711 - RNA, 19 nt, Artificial Sequence
  Synthetic
gcauaguccaagacauaaa

SEQ ID NO: 3712 - RNA, 19 nt, Artificial Sequence
  Synthetic
ugacaauggcacuggauau

SEQ ID NO: 3713 - RNA, 19 nt, Artificial Sequence
  Synthetic
caacagaugacuauaggaa

SEQ ID NO: 3714 - RNA, 19 nt, Artificial Sequence
  Synthetic
gggaaaagauaaaagacau

SEQ ID NO: 3715 - RNA, 19 nt, Artificial Sequence
  Synthetic
ucacauugaucaaagggaa

SEQ ID NO: 3716 - RNA, 19 nt, Artificial Sequence
  Synthetic
acaagaaggaagaggcauu

SEQ ID NO: 3717 - RNA, 19 nt, Artificial Sequence
  Synthetic
aggaagaggcauugcucaa

SEQ ID NO: 3718 - RNA, 19 nt, Artificial Sequence
  Synthetic
cucacagggucaagagaaa

SEQ ID NO: 3719 - RNA, 19 nt, Artificial Sequence
  Synthetic
ggacagaggcagugaggag

SEQ ID NO: 3720 - RNA, 19 nt, Artificial Sequence
  Synthetic
ccacaagaaggaagaggca

SEQ ID NO: 3721 - RNA, 19 nt, Artificial Sequence
  Synthetic
aguacagugcagagaauuu

SEQ ID NO: 3722 - RNA, 19 nt, Artificial Sequence
  Synthetic
caauagacucccaggaacu

SEQ ID NO: 3723 - RNA, 19 nt, Artificial Sequence
  Synthetic
ggccaugggcaaagcaaca

SEQ ID NO: 3724 - RNA, 19 nt, Artificial Sequence
  Synthetic
ggugucuccaugagggaua

SEQ ID NO: 3725 - RNA, 19 nt, Artificial Sequence
  Synthetic
gugagagauguuaggucua

SEQ ID NO: 3726 - RNA, 19 nt, Artificial Sequence
  Synthetic
auucaucaaacgugaggaa

SEQ ID NO: 3727 - RNA, 19 nt, Artificial Sequence
  Synthetic
agagagcagaucagggcua

SEQ ID NO: 3728 - RNA, 19 nt, Artificial Sequence
  Synthetic
aggaaaggguuguagauaa

SEQ ID NO: 3729 - RNA, 19 nt, Artificial Sequence
  Synthetic
guaaaugaucaguggauaa

SEQ ID NO: 3730 - RNA, 19 nt, Artificial Sequence
  Synthetic
gcuaagaucucaagucaaa

SEQ ID NO: 3731 - RNA, 19 nt, Artificial Sequence
  Synthetic
gcggagagguucacaacaa

SEQ ID NO: 3732 - RNA, 19 nt, Artificial Sequence
  Synthetic
ggauggaaaugcugggaga

SEQ ID NO: 3733 - RNA, 19 nt, Artificial Sequence
  Synthetic
cgaagaaacuaacaaggaa

SEQ ID NO: 3734 - RNA, 19 nt, Artificial Sequence
  Synthetic
gaacaaauauguagugagu

SEQ ID NO: 3735 - RNA, 19 nt, Artificial Sequence
  Synthetic
guacaugauuccaacauaa

SEQ ID NO: 3736 - RNA, 19 nt, Artificial Sequence
  Synthetic
caagagaggugaagaaagu

SEQ ID NO: 3737 - RNA, 19 nt, Artificial Sequence
  Synthetic
ggagaaugggagacauaua

SEQ ID NO: 3738 - RNA, 19 nt, Artificial Sequence
  Synthetic
gcacaggagcggaaggaca

SEQ ID NO: 3739 - RNA, 19 nt, Artificial Sequence
  Synthetic
ggagaaagcaagaucauga

SEQ ID NO: 3740 - RNA, 19 nt, Artificial Sequence
  Synthetic
gggcaguuguggaaaguga

SEQ ID NO: 3741 - RNA, 19 nt, Artificial Sequence
  Synthetic
ggauggacaugguagagaa

SEQ ID NO: 3742 - RNA, 19 nt, Artificial Sequence
  Synthetic
acgagcaaguggauggaaa

SEQ ID NO: 3743 - RNA, 19 nt, Artificial Sequence
  Synthetic
ugggagaaugggagacaua

SEQ ID NO: 3744 - RNA, 19 nt, Artificial Sequence
  Synthetic
ccauuagccuguaaacaaa

SEQ ID NO: 3745 - RNA, 19 nt, Artificial Sequence
  Synthetic
ggaaaggguuguagauaag

SEQ ID NO: 3746 - RNA, 19 nt, Artificial Sequence
  Synthetic
gcuaaaugcuauggugauu

SEQ ID NO: 3747 - RNA, 19 nt, Artificial Sequence
  Synthetic
ggaccuacccaaaccaaua

SEQ ID NO: 3748 - RNA, 19 nt, Artificial Sequence
  Synthetic
gcucuaagggcuauaaauu

SEQ ID NO: 3749 - RNA, 19 nt, Artificial Sequence
  Synthetic
caacaaagaagcuggaucu

SEQ ID NO: 3750 - RNA, 19 nt, Artificial Sequence
  Synthetic
guccagauaugaacaaaua

SEQ ID NO: 3751 - RNA, 19 nt, Artificial Sequence
  Synthetic
gcacaguagcaaacucaua

SEQ ID NO: 3752 - RNA, 19 nt, Artificial Sequence
  Synthetic
agacagcacugaugaccaa

SEQ ID NO: 3753 - RNA, 19 nt, Artificial Sequence
  Synthetic
ccauguggcaucaggacaa

SEQ ID NO: 3754 - RNA, 19 nt, Artificial Sequence
  Synthetic
ggagaaagcaucagggaaa

SEQ ID NO: 3755 - RNA, 19 nt, Artificial Sequence
  Synthetic
ggacauagacaaagagaau

SEQ ID NO: 3756 - RNA, 19 nt, Artificial Sequence
  Synthetic
ugauaaaccuguaggaaca

SEQ ID NO: 3757 - RNA, 19 nt, Artificial Sequence
  Synthetic
gcgauuacaagaagagaaa

SEQ ID NO: 3758 - RNA, 19 nt, Artificial Sequence
  Synthetic
gagaagugaugaagcgaau

SEQ ID NO: 3759 - RNA, 19 nt, Artificial Sequence
  Synthetic
ugauaaagcccuugaugaa

SEQ ID NO: 3760 - RNA, 19 nt, Artificial Sequence
  Synthetic
cgaauuuaacagagagaau

SEQ ID NO: 3761 - RNA, 19 nt, Artificial Sequence
  Synthetic
gguucauaguggagauaau

SEQ ID NO: 3762 - RNA, 19 nt, Artificial Sequence
  Synthetic
cagagaaaggugugaaauu

SEQ ID NO: 3763 - RNA, 19 nt, Artificial Sequence
  Synthetic
guguaaagaaguagacuau

SEQ ID NO: 3764 - RNA, 19 nt, Artificial Sequence
  Synthetic
cagagagaauucaggacua

SEQ ID NO: 3765 - RNA, 19 nt, Artificial Sequence
  Synthetic
gggcauaucuacacaccaa

SEQ ID NO: 3766 - RNA, 19 nt, Artificial Sequence
  Synthetic
agaaggaguuugagaaguu

SEQ ID NO: 3767 - RNA, 19 nt, Artificial Sequence
  Synthetic
gagaacaggcgaaguuuua

SEQ ID NO: 3768 - RNA, 19 nt, Artificial Sequence
  Synthetic
cagcaauguuagauaauga

SEQ ID NO: 3769 - RNA, 19 nt, Artificial Sequence
  Synthetic
gaauuacagcauagugaua

SEQ ID NO: 3770 - RNA, 19 nt, Artificial Sequence
  Synthetic
gguaauccucuuagacaua

SEQ ID NO: 3771 - RNA, 19 nt, Artificial Sequence
  Synthetic
aaacuuaggcugcuagaaa

SEQ ID NO: 3772 - RNA, 19 nt, Artificial Sequence
  Synthetic
acauaaaugaagacgagua

SEQ ID NO: 3773 - RNA, 19 nt, Artificial Sequence
  Synthetic
acauagacaaagagaauga

SEQ ID NO: 3774 - RNA, 19 nt, Artificial Sequence
  Synthetic
agauaaucaugguggacau

SEQ ID NO: 3775 - RNA, 19 nt, Artificial Sequence
  Synthetic
cuacaacugaugagauuua

SEQ ID NO: 3776 - RNA, 19 nt, Artificial Sequence
  Synthetic
cuuacaggaagcagagaaa

SEQ ID NO: 3777 - RNA, 19 nt, Artificial Sequence
  Synthetic
ggaaauaacacuauaucca

SEQ ID NO: 3778 - RNA, 19 nt, Artificial Sequence
  Synthetic
aggaggacauggaggauga

SEQ ID NO: 3779 - RNA, 19 nt, Artificial Sequence
  Synthetic
gggagaaagcaucagggaa

SEQ ID NO: 3780 - RNA, 19 nt, Artificial Sequence
  Synthetic
ggaacauggcuuacaggaa

SEQ ID NO: 3781 - RNA, 19 nt, Artificial Sequence
  Synthetic
gugcaucuguuaaggcaaa

SEQ ID NO: 3782 - RNA, 19 nt, Artificial Sequence
  Synthetic
ccaauuuagggaagaggaa

SEQ ID NO: 3783 - RNA, 19 nt, Artificial Sequence
  Synthetic
ugacgugucucuugauaaa

SEQ ID NO: 3784 - RNA, 19 nt, Artificial Sequence
  Synthetic
aagaagaaauggagaagaa

SEQ ID NO: 3785 - RNA, 19 nt, Artificial Sequence
  Synthetic
cgaaagaaauaaagcucaa

SEQ ID NO: 3786 - RNA, 19 nt, Artificial Sequence
  Synthetic
ggacaggacaguauagaua

SEQ ID NO: 3787 - RNA, 19 nt, Artificial Sequence
  Synthetic
ccugaagagcauagaauaa

SEQ ID NO: 3788 - RNA, 19 nt, Artificial Sequence
  Synthetic
cuuuaaagcugcagaacau

SEQ ID NO: 3789 - RNA, 19 nt, Artificial Sequence
  Synthetic
aaauaaagcucaacgagaa

SEQ ID NO: 3790 - RNA, 19 nt, Artificial Sequence
  Synthetic
acacaaugaugacggauaa

SEQ ID NO: 3791 - RNA, 19 nt, Artificial Sequence
  Synthetic
gaaauggagaagaaagaaa

SEQ ID NO: 3792 - RNA, 19 nt, Artificial Sequence
  Synthetic
gauaaucggaagagauaua

SEQ ID NO: 3793 - RNA, 19 nt, Artificial Sequence
  Synthetic
guacaaaccaugagcaaca

SEQ ID NO: 3794 - RNA, 19 nt, Artificial Sequence
  Synthetic
ggaaacaggaagagaggau

SEQ ID NO: 3795 - RNA, 19 nt, Artificial Sequence
  Synthetic
agaaagagaaacugaggaa

SEQ ID NO: 3796 - RNA, 19 nt, Artificial Sequence
  Synthetic
gaaacaagaagcugaagaa

SEQ ID NO: 3797 - RNA, 19 nt, Artificial Sequence
  Synthetic
gaaggaagaacaagaacaa

SEQ ID NO: 3798 - RNA, 19 nt, Artificial Sequence
  Synthetic
gcaaagaggggcaaagaaa

SEQ ID NO: 3799 - RNA, 19 nt, Artificial Sequence
  Synthetic
ggaaagggccuauguacua

SEQ ID NO: 3800 - RNA, 19 nt, Artificial Sequence
  Synthetic
caaagaaauaacaggagua

SEQ ID NO: 3801 - RNA, 19 nt, Artificial Sequence
  Synthetic
ccaagaaagaagauaaaga

SEQ ID NO: 3802 - RNA, 19 nt, Artificial Sequence
  Synthetic
cugauaaucggaagagaua

SEQ ID NO: 3803 - RNA, 19 nt, Artificial Sequence
  Synthetic
agaaguuaaaccagagaaa

SEQ ID NO: 3804 - RNA, 19 nt, Artificial Sequence
  Synthetic
acaagaagcugaagaaaau

SEQ ID NO: 3805 - RNA, 19 nt, Artificial Sequence
  Synthetic
gcaaugagccuuugguuuu

SEQ ID NO: 3806 - RNA, 19 nt, Artificial Sequence
  Synthetic
gugaacaggccaagaaaga

SEQ ID NO: 3807 - RNA, 19 nt, Artificial Sequence
  Synthetic
ggccaagaaagaagauaaa

SEQ ID NO: 3808 - RNA, 19 nt, Artificial Sequence
  Synthetic
aggccaagaaagaagauaa

SEQ ID NO: 3809 - RNA, 19 nt, Artificial Sequence
  Synthetic
gagcaauggugaaaagaau

SEQ ID NO: 3810 - RNA, 19 nt, Artificial Sequence
  Synthetic
gaagagaagaggaagccaa

SEQ ID NO: 3811 - RNA, 19 nt, Artificial Sequence
  Synthetic
gauuaaaggacaaccagaa

SEQ ID NO: 3812 - RNA, 19 nt, Artificial Sequence
  Synthetic
cagacgauaccgaaagaaa

SEQ ID NO: 3813 - RNA, 19 nt, Artificial Sequence
  Synthetic
ggaaaggcagcaagaggaa

SEQ ID NO: 3814 - RNA, 19 nt, Artificial Sequence
  Synthetic
ugagagaaguguacggaaa

SEQ ID NO: 3815 - RNA, 19 nt, Artificial Sequence
  Synthetic
ccuuagagauggagcaaga

SEQ ID NO: 3816 - RNA, 19 nt, Artificial Sequence
  Synthetic
acaaaugacaaauggguua

SEQ ID NO: 3817 - RNA, 19 nt, Artificial Sequence
  Synthetic
gggaugauguauuuggaua

SEQ ID NO: 3818 - RNA, 19 nt, Artificial Sequence
  Synthetic
guggagauggugagagaaa

SEQ ID NO: 3819 - RNA, 19 nt, Artificial Sequence
  Synthetic
gagagaaaucgcugguaua

SEQ ID NO: 3820 - RNA, 19 nt, Artificial Sequence
  Synthetic
gagcacagcaagagagaga

SEQ ID NO: 3821 - RNA, 19 nt, Artificial Sequence
  Synthetic
gggucgugauucagaguaa

SEQ ID NO: 3822 - RNA, 19 nt, Artificial Sequence
  Synthetic
agacacagcuucugaaauu

SEQ ID NO: 3823 - RNA, 19 nt, Artificial Sequence
  Synthetic
ccaagaugcuccagaugaa

SEQ ID NO: 3824 - RNA, 19 nt, Artificial Sequence
  Synthetic
gaacaaguuaugugaagaa

SEQ ID NO: 3825 - RNA, 19 nt, Artificial Sequence
  Synthetic
gggaugagaagcaggacaa

SEQ ID NO: 3826 - RNA, 19 nt, Artificial Sequence
  Synthetic
ccaaaggaaugguggagau

SEQ ID NO: 3827 - RNA, 19 nt, Artificial Sequence
  Synthetic
cagaauggauacagcagaa

SEQ ID NO: 3828 - RNA, 19 nt, Artificial Sequence
  Synthetic
gcaaagguguauauaguau

SEQ ID NO: 3829 - RNA, 19 nt, Artificial Sequence
  Synthetic
ccucaaugcucuuaaaaua

SEQ ID NO: 3830 - RNA, 19 nt, Artificial Sequence
  Synthetic
ugacaaagacaguguuaau

SEQ ID NO: 3831 - RNA, 19 nt, Artificial Sequence
  Synthetic
cugcaguaauucagaggaa

SEQ ID NO: 3832 - RNA, 19 nt, Artificial Sequence
  Synthetic
acacgaugcuuuagaauuu

SEQ ID NO: 3833 - RNA, 19 nt, Artificial Sequence
  Synthetic
aggcacagguagugaugua

SEQ ID NO: 3834 - RNA, 19 nt, Artificial Sequence
  Synthetic
cagaaaaccuuguaacuua

SEQ ID NO: 3835 - RNA, 19 nt, Artificial Sequence
  Synthetic
ggaauggcuuggagaugaa

SEQ ID NO: 3836 - RNA, 19 nt, Artificial Sequence
  Synthetic
cuauacaacuaaagcgauu

SEQ ID NO: 3837 - RNA, 19 nt, Artificial Sequence
  Synthetic
acgaauggcagaauggaua

SEQ ID NO: 3838 - RNA, 19 nt, Artificial Sequence
  Synthetic
agacuuagauccugauauu

SEQ ID NO: 3839 - RNA, 19 nt, Artificial Sequence
  Synthetic
ggacaagaagaaacuguua

SEQ ID NO: 3840 - RNA, 19 nt, Artificial Sequence
  Synthetic
uauuaaaccauuugggcaa

SEQ ID NO: 3841 - RNA, 19 nt, Artificial Sequence
  Synthetic
agaaaugguuccacaguuu

SEQ ID NO: 3842 - RNA, 19 nt, Artificial Sequence
  Synthetic
gguggauaguuuagaugaa

SEQ ID NO: 3843 - RNA, 19 nt, Artificial Sequence
  Synthetic
gaugaggcuucaagauaua

SEQ ID NO: 3844 - RNA, 19 nt, Artificial Sequence
  Synthetic
ggugguaacuuuugaauua

SEQ ID NO: 3845 - RNA, 19 nt, Artificial Sequence
  Synthetic
ggaaagagaaugugcaauu

SEQ ID NO: 3846 - RNA, 19 nt, Artificial Sequence
  Synthetic
uuuaagaaguggagaacua

SEQ ID NO: 3847 - RNA, 19 nt, Artificial Sequence
  Synthetic
acaaaugacaaguggguaa

SEQ ID NO: 3848 - RNA, 19 nt, Artificial Sequence
  Synthetic
cagcaagagagaaggguaa

SEQ ID NO: 3849 - RNA, 19 nt, Artificial Sequence
  Synthetic
gaaauaacuucuugccaaa

SEQ ID NO: 3850 - RNA, 19 nt, Artificial Sequence
  Synthetic
aggcacagguagugauuua

SEQ ID NO: 3851 - RNA, 19 nt, Artificial Sequence
  Synthetic
ucgaaugguuagaguauua

SEQ ID NO: 3852 - RNA, 19 nt, Artificial Sequence
  Synthetic
gcaauaagcuggaggugga

SEQ ID NO: 3853 - RNA, 19 nt, Artificial Sequence
  Synthetic
gaacuuagcuucaagaauu

SEQ ID NO: 3854 - RNA, 19 nt, Artificial Sequence
  Synthetic
ccaaauacagauauggaaa

SEQ ID NO: 3855 - RNA, 19 nt, Artificial Sequence
  Synthetic
gcgaauggcagaauggaua

SEQ ID NO: 3856 - RNA, 19 nt, Artificial Sequence
  Synthetic
gagagaguguagugauuaa

SEQ ID NO: 3857 - RNA, 19 nt, Artificial Sequence
  Synthetic
ggaaugaaaugcuuugaaa

SEQ ID NO: 3858 - RNA, 19 nt, Artificial Sequence
  Synthetic
gguuauaucuaguguauca

SEQ ID NO: 3859 - RNA, 19 nt, Artificial Sequence
  Synthetic
gaacaguauucuugcaauu

SEQ ID NO: 3860 - RNA, 19 nt, Artificial Sequence
  Synthetic
gcagagagcuuggagauaa

SEQ ID NO: 3861 - RNA, 19 nt, Artificial Sequence
  Synthetic
cagaagaggugguggaaug

SEQ ID NO: 3862 - RNA, 19 nt, Artificial Sequence
  Synthetic
guauuuaagaaguggagaa

SEQ ID NO: 3863 - RNA, 19 nt, Artificial Sequence
  Synthetic
gagaugauguauuuggaua

SEQ ID NO: 3864 - RNA, 19 nt, Artificial Sequence
  Synthetic
ggcaaagaaugaagccaaa

SEQ ID NO: 3865 - RNA, 19 nt, Artificial Sequence
  Synthetic
aauuagggcuauacagaaa

SEQ ID NO: 3866 - RNA, 19 nt, Artificial Sequence
  Synthetic
uaacagagcuauagaucuu

SEQ ID NO: 3867 - RNA, 19 nt, Artificial Sequence
  Synthetic
aaacacagcuucugaaauu

SEQ ID NO: 3868 - RNA, 19 nt, Artificial Sequence
  Synthetic
cagcauuaauugugcaaga

SEQ ID NO: 3869 - RNA, 19 nt, Artificial Sequence
  Synthetic
ggacaagaugagacuauaa

SEQ ID NO: 3870 - RNA, 19 nt, Artificial Sequence
  Synthetic
ccaaguuacucaugaucaa

SEQ ID NO: 3871 - RNA, 19 nt, Artificial Sequence
  Synthetic
aggcaaagaaugaagccaa

SEQ ID NO: 3872 - RNA, 19 nt, Artificial Sequence
  Synthetic
cagaaggacuggagugaua

SEQ ID NO: 3873 - RNA, 19 nt, Artificial Sequence
  Synthetic
gggacagacuuuaguaaua

SEQ ID NO: 3874 - RNA, 19 nt, Artificial Sequence
  Synthetic
gauccaagagcuagggaaa

SEQ ID NO: 3875 - RNA, 19 nt, Artificial Sequence
  Synthetic
ggaagaguggucagagaaa

SEQ ID NO: 3876 - RNA, 19 nt, Artificial Sequence
  Synthetic
cagcauggcgacagaauua

SEQ ID NO: 3877 - RNA, 19 nt, Artificial Sequence
  Synthetic
cgacagaauuacaauagaa

SEQ ID NO: 3878 - RNA, 19 nt, Artificial Sequence
  Synthetic
gcgaaaggucagaggagau

SEQ ID NO: 3879 - RNA, 19 nt, Artificial Sequence
  Synthetic
aguaauaguuccaccuaaa

SEQ ID NO: 3880 - RNA, 19 nt, Artificial Sequence
  Synthetic
aaacagaaguugugaguuc

SEQ ID NO: 3881 - RNA, 19 nt, Artificial Sequence
  Synthetic
caaugaaacuuguuaccaa

SEQ ID NO: 3882 - RNA, 19 nt, Artificial Sequence
  Synthetic
ggauaaucgccuucacaaa

SEQ ID NO: 3883 - RNA, 19 nt, Artificial Sequence
  Synthetic
ggucagagaaacaguauau

SEQ ID NO: 3884 - RNA, 19 nt, Artificial Sequence
  Synthetic
agagaagugcacugggaaa

SEQ ID NO: 3885 - RNA, 19 nt, Artificial Sequence
  Synthetic
ccucauagaaccagagcau

SEQ ID NO: 3886 - RNA, 19 nt, Artificial Sequence
  Synthetic
gacagaaguuugcaagaua

SEQ ID NO: 3887 - RNA, 19 nt, Artificial Sequence
  Synthetic
ggugaauuugggagugaaa

SEQ ID NO: 3888 - RNA, 19 nt, Artificial Sequence
  Synthetic
uggagauguucaaggacaa

SEQ ID NO: 3889 - RNA, 19 nt, Artificial Sequence
  Synthetic
caacauuccuccauauuua

SEQ ID NO: 3890 - RNA, 19 nt, Artificial Sequence
  Synthetic
uggcaugccuuaagagaga

SEQ ID NO: 3891 - RNA, 19 nt, Artificial Sequence
  Synthetic
gaaaguauagccagagaau

SEQ ID NO: 3892 - RNA, 19 nt, Artificial Sequence
  Synthetic
gagaagaagauccgaauca

SEQ ID NO: 3893 - RNA, 19 nt, Artificial Sequence
  Synthetic
ugguugaggcccagcgaaa

SEQ ID NO: 3894 - RNA, 19 nt, Artificial Sequence
  Synthetic
ccgacaacuucuaaggaga

SEQ ID NO: 3895 - RNA, 19 nt, Artificial Sequence
  Synthetic
ggucagaggagaugggucu

SEQ ID NO: 3896 - RNA, 19 nt, Artificial Sequence
  Synthetic
cagacuauggaaugaguaa

SEQ ID NO: 3897 - RNA, 19 nt, Artificial Sequence
  Synthetic
uugaagagauggauaguca

SEQ ID NO: 3898 - RNA, 19 nt, Artificial Sequence
  Synthetic
gaguaguaacaaugagaga

SEQ ID NO: 3899 - RNA, 19 nt, Artificial Sequence
  Synthetic
guggaagaguggucagaga

SEQ ID NO: 3900 - RNA, 19 nt, Artificial Sequence
  Synthetic
ggauggugguuguguuauu

SEQ ID NO: 3901 - RNA, 19 nt, Artificial Sequence
  Synthetic
aggaguuaaacaugaguaa

SEQ ID NO: 3902 - RNA, 19 nt, Artificial Sequence
  Synthetic
ccucagaacauuugggaua

SEQ ID NO: 3903 - RNA, 19 nt, Artificial Sequence
  Synthetic
ugaaaguaguagucagaaa

SEQ ID NO: 3904 - RNA, 19 nt, Artificial Sequence
  Synthetic
gagaagaugugcaauaaga

SEQ ID NO: 3905 - RNA, 19 nt, Artificial Sequence
  Synthetic
ggaugaagaagaugaacuu

SEQ ID NO: 3906 - RNA, 19 nt, Artificial Sequence
  Synthetic
gcuaaagcaauguuguuaa

SEQ ID NO: 3907 - RNA, 19 nt, Artificial Sequence
  Synthetic
gaucaugaauggaggaaua

SEQ ID NO: 3908 - RNA, 19 nt, Artificial Sequence
  Synthetic
gcagcaagcucaagaagaa

SEQ ID NO: 3909 - RNA, 19 nt, Artificial Sequence
  Synthetic
ugaaaguacuugaggauca

SEQ ID NO: 3910 - RNA, 19 nt, Artificial Sequence
  Synthetic
agaaggaggcagagaggaa

SEQ ID NO: 3911 - RNA, 19 nt, Artificial Sequence
  Synthetic
aggaaaugauccagcgcua

SEQ ID NO: 3912 - RNA, 19 nt, Artificial Sequence
  Synthetic
cguuugaacugguggguga

SEQ ID NO: 3913 - RNA, 19 nt, Artificial Sequence
  Synthetic
ccagcagaguccagggcaa

SEQ ID NO: 3914 - RNA, 19 nt, Artificial Sequence
  Synthetic
ccauggagcagaaggagaa

SEQ ID NO: 3915 - RNA, 19 nt, Artificial Sequence
  Synthetic
gcugaaaguacuugaggau

SEQ ID NO: 3916 - RNA, 19 nt, Artificial Sequence
  Synthetic
ggacaagaagagagcagau

SEQ ID NO: 3917 - RNA, 19 nt, Artificial Sequence
  Synthetic
cagcagacacagcagaaua

SEQ ID NO: 3918 - RNA, 19 nt, Artificial Sequence
  Synthetic
acuuacagauucagaguau

SEQ ID NO: 3919 - RNA, 19 nt, Artificial Sequence
  Synthetic
gggacaggguugggaggaa

SEQ ID NO: 3920 - RNA, 19 nt, Artificial Sequence
  Synthetic
ccauagucgucguggcaga

SEQ ID NO: 3921 - RNA, 19 nt, Artificial Sequence
  Synthetic
aggagaagucaaagcgaga

SEQ ID NO: 3922 - RNA, 19 nt, Artificial Sequence
  Synthetic
gggacuugaugcugcggaa

SEQ ID NO: 3923 - RNA, 19 nt, Artificial Sequence
  Synthetic
gcagcuucauagagagaga

SEQ ID NO: 3924 - RNA, 19 nt, Artificial Sequence
  Synthetic
ggagaauaccaaggaacaa

SEQ ID NO: 3925 - RNA, 19 nt, Artificial Sequence
  Synthetic
aggagaauaccaaggaaca

SEQ ID NO: 3926 - RNA, 19 nt, Artificial Sequence
  Synthetic
gaacaaauccggagagaga

SEQ ID NO: 3927 - RNA, 19 nt, Artificial Sequence
  Synthetic
ccaaagaccuaguggaaca

SEQ ID NO: 3928 - RNA, 19 nt, Artificial Sequence
  Synthetic
gagaggaagaugaggauga

SEQ ID NO: 3929 - RNA, 19 nt, Artificial Sequence
  Synthetic
gcccaaagaccuaguggaa

SEQ ID NO: 3930 - RNA, 19 nt, Artificial Sequence
  Synthetic
acaaauccggagagagaua

SEQ ID NO: 3931 - RNA, 19 nt, Artificial Sequence
  Synthetic
ggaaguugcaguaguggua

SEQ ID NO: 3932 - RNA, 19 nt, Artificial Sequence
  Synthetic
gagagaagaacaauggcaa

SEQ ID NO: 3933 - RNA, 19 nt, Artificial Sequence
  Synthetic
ggggagaaacuuuaggaua

SEQ ID NO: 3934 - RNA, 19 nt, Artificial Sequence
  Synthetic
guaaugaggaacagcaaga

SEQ ID NO: 3935 - RNA, 19 nt, Artificial Sequence
  Synthetic
gcaggauaugcuagcaaua

SEQ ID NO: 3936 - RNA, 19 nt, Artificial Sequence
  Synthetic
uguccagacucuagugcaa

SEQ ID NO: 3937 - RNA, 19 nt, Artificial Sequence
  Synthetic
ccuaauaacauugaagcaa

SEQ ID NO: 3938 - RNA, 19 nt, Artificial Sequence
  Synthetic
ggacucagugcuucggaaa

SEQ ID NO: 3939 - RNA, 19 nt, Artificial Sequence
  Synthetic
ggaugaugaagaugaauga

SEQ ID NO: 3940 - RNA, 19 nt, Artificial Sequence
  Synthetic
ccgaggugcuggugcuaau

We claim:

1. An siRNA comprising a sense region and an antisense region, wherein said sense region and said antisense region together form a duplex region, said antisense region and said sense region are each 18-30 nucleotides in length and said antisense region comprises a sequence that is at least 90% complementary to a sequence selected from the group consisting of SEQ. ID NOs. 438-3940.

2. An siRNA comprising a sense region and an antisense region, wherein said sense region and said antisense region together form a duplex region and said sense region and said antisense region are each 18-30 nucleotides in length, and said antisense region comprises a sequence that is 100% complementary to a contiguous stretch of at least 18 bases of a sequence selected from the group consisting of SEQ. ID NOs. 438-3940.

3. The siRNA of claim 2, wherein each of said antisense region and said sense region are 19-30 nucleotides in length, and said antisense region comprises a sequence that is 100% complementary to said sequence selected from the group consisting of: SEQ. ID NOs. 438-3940.

4. A pool of at least two siRNAs, wherein said pool comprises a first siRNA and a second siRNA, said first siRNA comprises a first antisense region and a first sense region that together form a first duplex region and each of said first antisense region and said first sense region are 18-30 nucleotides in length and said first antisense region is at least 90% complementary to 18 bases of a first sequence selected from the group consisting of: SEQ. ID NOs. 438-3940 and said second siRNA comprises a second antisense region and a second sense region that together form a second duplex region and each of said second antisense region and said second sense region are 18-30 nucleotides in length and said second antisense region is at least 90% complementary to 18 bases of a second sequence selected from the group consisting of: SEQ. ID NOs. 438-3940, wherein said first antisense region and said second antisense region are not identical.

5. The pool of claim 4, wherein said first antisense region comprises a sequence that is 100% complementary to at least 18 bases of said first sequence, and said second antisense region comprises a sequence that is 100% complementary to at least 18 bases of said second sequence.

6. The pool of claim 4, wherein said first siRNA is 19-30 nucleotides in length and said first antisense region comprises a sequence that is at least 90% complementary to said first sequence, and second siRNA is 19-30 nucleotides in length and said second antisense region comprises a sequence that is at least 90% complementary to said second sequence.

7. The pool of claim 4, wherein said first antisense region is 19-30 nucleotides in length and said first antisense region comprises a sequence that is 100% complementary to at least 18 bases of said first sequence, and said second antisense region is 19-30 nucleotides in length and said second antisense region comprises a sequence that is 100% complementary to said second sequence.

8. The siRNA of claim 1, wherein said antisense region and said sense region are each 19-25 nucleotides in length.

9. The siRNA of claim 4, wherein said first antisense region, said first sense region, said second sense region and said second antisense region are each 19-25 nucleotides in length.
